United States Patent Application Publication US 2026/0191916 A1 - sequence listing, part 40

SEQ ID NO: 154 - DNA, 4937525 bp, Bacteroides uniformis (residues 1,645,843-3,291,684 of 4,937,525)
  source 1..4937525: mol_type = genomic DNA
atgtagggcacgcctgctttggccggattttctcccgtcaccaacagcaaattctcgaaaggtgccagcttcttgatggccttgtattcgttcacgatttcttcttccgtcagtatggtacgcggcatggggttgctgatatggaaaccgcaatacacgcaagagttggtgcaggaattcgtgatgtaaagaggcacgaacatggagatggtcttcccgaatcgtgcctcggtgtatttcttgctcaatcgtgccatcgtctccagatagggagcagcggcgggtgagatgagggccatgaagtcctctacattacaatgttctttggagagggcacggcgtacatccgcatctgtcttggcatggatgcgtgccgtggtttcctcccaggatatatgttctaattcgtctgaaaacatagtgttctatcaattcccatttatttcttttttaattctctcgacaaccgcattgcacagaagtttggtccgcacatcgtgcaatactccccatccacatgcttccctgcatggaaatagctgaacgcacgttccgggtcgagcgacaagtcaaactggtctttccagcggaattcataacgtgctttgctcagtgcattgtcacgcacttgtgctccgggatgcccttttgccaggtcggcggcatgggcggctatcttataggtgatgacacctacacgcacatcctccttatcgggcagcgccagatgctctttgggggtgacataacagagcatggccgtacccagccaacctatctgtgccgcgccgatggcagacgtaatatggtcgtaacccggtgcgatgtccgtcacgatggggccgagcgtatagaaaggcgcatcgtggcatttttctatctggcgctccatattctccttaatcttgtgcatgggcacgtggccaggaccttcgatgaaagcctgcacattcttgtcccaagcacgcagcacaagctcgcccatcgtgtcgagttctgcaaactgcgcttcatcgttggcatcgtgcgtagaccccggacgcagcccgtctcccaaagagatggcaacgtcatactgtgccagaatgtcgcaaatgtcatcaaagtgttcgtaaaggaaactctcgcggtcgtgcactaggcaccatttgctcatgatgctgccgccacggctcacgataccgcacaaccttttctcggccagatgcacattatggcggcgtataccggcatggatggtgaagtagtccactccctgctcgcattgttcaatcaaggtgtcgcggtagatttcccaggtgaggtcctccaccttgccgttcactttctccaatgcctggtagatggggacagtacctaccggaacgggacagttacggataatccattcgcgcgtttcgtggatattctctccggtggagaggtccatcagcgtgtcgccgccccatttacagctccataaagccttttccacctcttcttcaatgccggaagtggtggcggagtttccgatattggtatttatcttcaccaggaagttacggcctataatcatcggctctgcttcgggatggttgatgttggcaggaagcagggcgcgtccggcagcaatctcccggcgtacaaattccggtgtgatgtgcgtctctattcccagctccgcgcagttcatgttctcgcgaatcgccacatactccatttcaggcgtgatgataccttgcttggcatagtacatctgtgtacagcattttccttgaagggcacggtagggcagggtgatgtgctcaaagcgcagagaatcgagtgacctgtcgtcgcggcgcatgcgcccgtactccgacgttatttcggaaagttgctccacatcgccgcgtttcagtatccacggttcgcgcaggcggggcagccctttctttaaatccacttcgacggcagggtcgctgaacggtccgctggtatcatacacatacacttcaagattcggggtaatcaccttttctccatctatgaagttcgtactgggcacttgttccactttacgcatagctacgcgcaattcgggaaacaaggtgcccggcaaatatactttctcggaacgggggaattttatcttctggttcattgcattgtcagttttataggttcaagaatgctgtcagcggtgagctggcttccgcaacaaaattatcggcttgtgcgcccagacctgcttcgtatgccatgcgtcctgcctctacagcctgcttgaacgctaccgtcatggccacggggtcgcccgctacggcaatggcggtattcaccaggcaagccgacgcgcccatttccatagcctctgccgcatggctcggggcaccgataccggcatccaccactacggggatattggcttgctcaatgattatcctcaagaaatcccttgtctgcagtcctttgtttgtgccgataggagcacccagcggcatgacggtggcggcacctgcctcttccagtctcttgcacagtgtggggtctgcctgacaatagggcagtactacgaagcccaatttgaccagttcctccgtggctttcaacgtctccacagaatccggcaacagatagcgggggtcggggtgtatctccagtttcagccagttcgtgccaaaagcctcacgcgccatctgtgcggcaaaaacagcttcttcggcattgcgcacgccggaggtattgggcagaagctgaatgccgggatgttgtatatgcaccagcatatcatcttccttattgtccagttcaattcgtttcattgccaccgtcaccatttccgtgccggatgccaagatggattgttccatcacttcgtcggaatggaactttccggttcctaaaaacaggcgagagttgaactcacgtcccgcaatcactaatttttccatgtcagtagtgttatattaatttttcgttctttactttttcccctgcttcttcattctttattaaagaaatgattctccgcatctcgtctgccggactatcggcatgcagcaccgtgccggatagggcaattccgctgactcccgtctgcataatggcgggaatgtctgcaatggtaattcctccgatggcaaccatgggcaggcatacgttctcctcccgcatccggttgacgatggcggcatagccttccaatcctaatatcgggcttaggttcttcttggtggtggtgtagcggaaagggccgcagcctatgtagtcggcaccagctttgtagtgttgctgtacatcctcaaaagtattggcggtaccgcctataatgtactccgcgcccagaatccggcgtgcgtcggctatgggcatgtctttctttccaagatgtacgccgtcggcacgcagcttctttaccagttccacatggtcgtcaatgatgaaggtcgcaccgtattgtcggcaaagagcctgcacctctaaggctacgggttctatcgtttccaccggggtgtctttcatgcgcagttgcacccagcggcaaccgccctcaagagccatgcgtgcagcatccaggtacgaatatcgctccgtatagtgcgtgatgaactgcattcctccgtttttcagcctctcgtccttcatcttcctcaccctccgcaagccgctttgataatgatgatggacatgtattccctcagggcgcattttgtccattccgtgcgaaatacaatatggttgtctacggccacggcaatgccttgcaccggtagggcaagttcctcgataagttgtgaaagggtagtggcgccggttttcacttccttgttgttgaccaatactttcatttttctgttcattaagaaataaaacaatggaagtaaatacaaagaagcgtctttacggcaagtttagtgaagaaaaaaatatccaattcctacggcagtactaactgcatcaggttcgagggtataatctcagcccgtcagggcacccctttgtctttacggcaacaaaggtaagggaaaatcggaaataaaaaacaaaaggaagctttttttctccctgtctctgacttttcttttccttaccatctccgtacctatacagacgtagcagatagagaagagattacaagaggaaagtaaagctctttaaaaagaaaggctgcctctccgaagaaagacagccttgaagatatactatacacaaagaattatgcaatcccgtgagccgttgcttccggtgcaattttcttgataagaccttgcagcactgcaccaggaccgcactctgtgaagtccgtagcaccatcggcaaccatgttcttcactgtttgcgtccaacgtaccgatgctgtcagctgagccaccagattcttcttgatttctgccgggtcagtatgaggcatagcgtctacattctgatatacggggcacttcggagcatggatttctgttgcattgatggctgcttccagttccactttggcagggtccatcaatggagagtggaatgcaccgcctaccttcaacggtaaggcgcgcttggcacctgcagccttcatcagttcgcaagccttgttgataccttctatggaaccggaaattacaatctgtcccgggcaattatagttggctgccacgcaaacttcaccttcggcacttacctgggcgcagatttcctcaaccttttcatccggcagggcaattatggctgccatagtggagggctgtgcttcgcaagccttttgcatagccatggcacgggcatacaccagtttcagaccatcttcaaagctcagtgcaccggcagcaaccaaagcggagaactcgcccagtgagtgaccggcggtcatctccggcttaaagtcatcgcccatgcagagggcggaaataacggaatgaaggaatacggcaggttgggtaactttagtctggcgcaggtcttcatctgtaccgttgaacataatatcagtaatacgatacccgaggatatcatttgctttctcaaaaagttccttggctaatgccgaattttcgtacaggtcctttcccatgccaacgaattgggcaccttgacccggaaatacaaatgctttcatatttactcgttttttagtgtttaaataaaaagtgctgcaaaggtagaggtttttctgatattcaccgcacaaacggatgttttttgtgcaatacccttactttaaggaggaagctaaaatacaatatgtatgcttgggtcttctgtgatatccggatactgaaatacttataaatgaaacacttcctccttattgtacttcctacaattagacctcttgtgtattcttgtaaattacatattgtattccatacgataacaactgaaaatgatattgtataaagtaagatatgtattcagttgaaaaataatgctttataacattgtaaaaatattcttttcctttgttgcaaattagaaaaacctatttatatttgcagcgcttaacgagatatattatgcaaaacatagaacaaaaaacgccgttggcaaacaatcatatctctgtggactgtgtagtgattggttttgacggagaacagctaaaggttctgctgattaagcgtgcaggagaggaagaaggagaaatctttcatgatatgaagcttcccggaagtctgatttatatggatgaggacttagatgaagctgccaaacgggtgttgaatgaattaacgggcctgaagaacgtcaatctgatgcaatttaaggcattcggttcaaaaaaccgtacgaaggaccccaaagatgtgcattggctggaacgtgccatgcagtccagggtggaacgtattgtcaccatagcctatctttccctggtgaagatagaccgcgcattgaaccgtgatttggacgattatcaagccagttgggtagccatgccggatataaaggctctggcattcgaccacaacctgattatcaaggaagccattacctatgtccgccagtacgtcgagttcaatccgtcttcactgttcgacttattgccgcgtaagttcaccgcatcccagcttcgcactttgtacgagctggtgtatgacaagcagtacgacgtacgcaatttccataaaaagatagccctgatggaatatgtcgttcctctggaagaaaaacagcaaggcgtggcccaccgggcggcacgttactaccgttttgacaaaaagatatacaataaaatccgacggtagccggattttgaattcttcatatcactttcattctttaatattgatagaaatgtatttattaggttatgacatcggcagctcgtctgtaaaagcgagtctggtaaatgcggaaagcggcaaatgtgtatcgtctgccttcttccccaagactgaagcggaaattatcgcagtgaagcccggctgggcagagcaagaccccggaaattggtgggaaaatttgaaactggccacacaagctgtattggcagaatccggagtaaacgcagaagacatcaaggcgattggtatctcttatcagatgcatggcttggtatgtgtagataaaaaccagcaggtgttgcgtcctgccattatctggtgcgactccagagccgtgccctacggacaaaaggctttcgaaacattgggagaggagacttgcctttcacatctgctgaattctccgggcaacttcacggcctccaaactggcttggattaaggagaatgagccttccgtttacgaaaagattcataagataatgctgccgggcgactatatcgccatgaagttgagcggtaccatctgtaccacggtgtccggtttgtccgaagggatgttctgggatttcaagaacaaccgggttgctgattttctgatggagtattatggattcgactcctctctgattgccgacatcaaaccgactttctccgagcagggacgcgtcaatgctgctgcagccgcagagctgggtctgaaagaaggtacgcctatcacttaccgtgctggcgaccagcccaacaatgccctttccctgaatgtattcaatccgggtgaaatagcttccaccgccggaacatccggcgtggtatacggcgtgaacggtgaggtgaattacgaccccaagtcacgtgtcaacacctttgcacacgtcaaccatactgccgggcaaacccgtctgggtgttctgctgtgcatcaatggtacgggcatcctcaattcatgggtaaaacgtaccgttgctcccgaaggcatctcctacagcgatatgaatctgctggcagcacaagctcccatcggcagtgccggcatcagcatcctgcccttcgggaacggtgcggagcgtatgctggagaacaaggaaataggctgctccattcatggcatcaacttcaaccagcacggcaagcagcatatcgtccgtgcagcgcaggaaggcatcgttttctccttcaaatatggaatcgacatcatggaacaaatgggcattcccgtgcagaaaattcatgccggcaaggctaatatgttcctcagcccgctgttccgcgagacattggccggtgtgacgggagctgtcatcgaactgtatgataccgacggctctgtaggtgccgccaaaggcgccggaatcggtgcgggcatatacaaggacaacaacgaagcatttgccacgcttgagaagctcgaggtgatagagccgaaagtggcagaccgccaggcttatgccgacgcatatgcgcgctggaaacactgtctggaagaagcaatgagataatgtatgattgattcatggcatcttgatatgaacaaatttttgcaacttatttaaatcaaataattaatcctttaaaacaaaattaagattatggcaacaaaagagtattttcccggaataggaaagattaaattcgaaggtaaagagagcaagaacccgatggcattccgttactacgatgccgataaagtaatcatgggcaagaaaatgagtgaatggctgaagttcgccatggcatggtggcacactctttgcgcagaaggcggcgaccagttcggtggcggaacaaagaaattcccctggaacggtgaggctgacaaggttcaggctgccaagaacaaaatggacgccggctttgaatttatgcagaaaatgggtatcgaatactactgcttccacgatgtagacctttgcgaagaagccgagaccattgaagaatacgaagccaacctgaaggaaatcgtagcgtatgccaagcagaaacaagctgaaaccggcatcaagctgttgtggggtaccgccaacgtattcggccatgctcgctatatgaatggcgcagccactaaccccgattttgatgtagtggcacgtgccgccgttcaaatcaagaacgccatcgacgctactatcgagctgggaggttcaaactatgtattctggggcggtcgcgaaggctacatgtctttgctgaatacagaccagaaacgtgagaaagagcacctcgcacagatgttgaccatcgcccgcgactatgcccgtgcccgcggattcaaaggtaccttcctgattgaaccgaaaccgatggaacctaccaaacaccagtatgatgtagacaccgaaaccgttatcggcttcttgaaggctcacaatctggacaaggatttcaaggtgaacatcgaagtgaaccacgctactttggcgggtcacaccttcgagcacgaactcgcagtagccgtagacaacggtatgctcggctccatcgacgccaaccgtggtgactaccagaacggctgggatacagaccagttccccatcgacaacttcgaactgacccaggccatgatgcaaatcatccgtaacggaggttttggcaatggcggtacaaacttcgatgccaagacccgtcgtaactccaccgacctggaagacattttcattgcccacatcgccggtatggacgtgatggcacgtgcactggaaagtgcagccaaactgcttgaagagtctccttacaaaaagatgctggccgaccgctatgcttccttcgacagtggtaaaggcaaggaatttgaagatggcaaactgacgctggaggatttggtagcttacgcaaaagccaacggtgagccgaaacagaccagcggcaagcaggaattgtatgaggcaatcgtgaatatgtactgctaataatgatcaatgtttagtgattagtggttaataggttgcgcatgaagtgtttcaatattaatcattaatcgctaatcattaatcgctaatcattaaccattaatcattaatatcatgaattatacagaaaaaggcagtaaactctacctcttctctattgtgttggtagccgtcattggaggattgcttttcggttacgatacagcagtcatatccggtgccgataaagggcttcaggcattctttatgggtgcccccgattttgtctacacagatacgattcacggcattacctcttccagtgcacttatcggatgtatcatcggtagtgctctttcgggattcttcgcatccaatctgggacgtaagaattctcttttcatagccggcgtcttgttctttctgtcggcattaggctcctactacccggaattccttttcttcgactatggtgttccttcctattccttgctcgtggcattcaacttctaccgtgtattgggaggaatcggcgttggtttggcatccgccatctgcccgatgtatattgcggaaattgcgccgagcaacattcgcgggactctggtatcatggaaccagtttgccattatcttcggccagttagtggtttacttcgtgaatttccttattttgggcgagaattcaaatccggtgataaaggccattgaaggagtcaaccagattctgaatcccgaagcggcagcatggaccacagagataggatggcgtctgatgtttgtcagtgaggctgttcctgcaggagtctttgcgttgctcgtactgtttgttcccgaaacgccacgctatcttgccatgagtggcaaggatgataaggcactccaggtgttaagccgtatcaacggcttggctcaggcaaaggttattctgtctcaaatcaaagccacggcagaggaaaagacggaaaagcttttcacttatggctggatggttatctttatcggaatcatgctgagtgtattccagcaagcggtaggtatcaacgccgtactctatttcgcaccgcgtatcttcgaaacgatgggaatgggcaacccgatggtgcagaccgtcattatgggtatcatcaatattctgttcacgttgctggctgtctttacagtcgagaaatggggacgtaaaccactgcttatctcgggatctatcggtatggcgataggtgctttcggagtagctctttgcaacgttgtggcagggcttcctcccatgttggctgttgtcagtatcatggtctacagtgcttcgttcatgttcagctggggccccatctgctgggtactgattgctgaaatcttcccgaataccatccgtggcgctgcagtagccattgccgtagcctttcaatggatattcaatttcattgtatcttccaccttcgtacctatgtacaatatgagtttgggagatatgggagacaagttcgggcacatgtttgcttatggcttatacggaatcatctgtgtggtggccgctctgtttgtctggaagcttgttcccgaaacgaaaggcaagacactggaagacatgaccagactgtggaagaatagaaaaaataatagataagaacgttattgaaactgtccatataaaatgagaaagaggttgtgtcaaaatgctgacacagcctttttttatgcgcaaagcccagactttctcaagcccgggctttgttattacccaaagttttcgtatctttaggcataaagtttttcgttatggcaaagttacattttcgtccttacattcccaaccaaaccgttctttttccacaaagaattgatgaaaacatagctgcgaacgacccggtccgcatcgtgaatgctgttattgacaacctcaatcttgagagtttcaagaagctttataaggaaacgggccgttgtccttatcatcctaaaatgatgcttaaggtgataatctacgcctacatgaataatatctattcttgccgtaaaatagagaagcacctccttcgtgacattcattatatttggcttgccggtaatgagcatccggattttatcacgatcaaccgttttcgtaaccgtgtaaaggaggaaataaataatgtatttacccagttgatttttgtccttgccgataaaggtttcatcagccttgatgtggagtatattgacggcaccaagattgaatccaaagccaacaaatatgcttttgtctggcgcaagacagtcgaacggaaccgtacgagactaatggataaaatccgtattctcttggagcaggtggatgaaaccattgcacaggagaactctataaaagacacatccgtggagtttacttcctgcaggctctctgacatagtggatgaacttaaagaagccctggaacgccagcctgcaacaaaggataaggaagaaaagaaagccctgcgcaaaaagaagaagcaggtcagggaacttgaagggtatcgtgacaagctgatagaatatgacaatcaccttgatacccttggagaacgtaactcctattccaagaccgatcctggtgccacattcatgcgcatgaaagaagatgccatgaagaacgggcagaccaaacccggatataatctgcaaataggtactgaaaaccaatttatcacagacttccgtctgtttcccaaccctaccgatacactgaccctcataccttttttccactctttccagtaccgctataaccgtttaccgaatatctgcgtggcagactccggttacggttcggaagaaaattaccggttcatgcaggagaatgggatagaagccttcatcaagtacaattacttccataaagaacagcgtccccgttatactcccaacccgttccatgccgaaagtctccattacaatgcccaagaggattattacgtttgtcctatgggacagcacatgaaccgtataggaaccaaacgtgacaagacagcgagcggatacatcaccgaaagtgcccggtataaagcaaaaagatgcgaaggttgccctttgcgtggcagttgttttaaagctcgggggaaccgtattatagaagtcaaccaccgattaaatcaatacaaacggcaggcacgggaaaggttgctctcagaagaaggtatcaagcatagaggcaggaggtgtatagaaccagaagctgtgtttggacaaatgaaatacaacatggcatacagaagattccggcatgtgggagaagacaaggttacaatggactttgctttctttgctatagcctttaatatcaaaaaaatgtgcgctaaactgataaaagaaggaaaggggctcattacagttgccaaatatttgtttatgggactatttataacccgatataattggaatatagcaacttgctgccaaatgcatgaggaaaaagtagcatagccaaaagaaaatatagcagaacttaaaatataaaagaggttgtgccaacgttttgacacaacctctcttcttgttatcatcccatatattctctcttatctgtaagcattcgaagaaatgcaccttttacactttgaggtttggttgtagctttgcggcagtgaatacaatcaaacctcaattattatgaacagacaagaatttgaagaattagaattgcaggtgcaacaaagcgagctgccgttgaagtcgtaccttcaacagataggtgtaagttattcaacctatcactactggcgtagaaaatgttccgttgacaggagcagtatcaaacacgagttggctcctatcagttttaaacaggcatttacggagtcttcccaagaagaacaattgccgcatggtgttgcgctgctgtttcccaatggacttcgtgcccacttcgggagcggttctgaagatttgctgaaggaaatatttacccaaagtcttcgagacggtcatgtttaacctgaacgacacgatgcgctacttcctgtgtcctggcaggacagatatgcgcaagggtatcagttcgctatgcggagtggtacatgagaaaatgaacagtgaagtgaggaacggtgatgtcttcatcttcatcggttccagccgcagactaatgaaactccttcatgccgaagacggaggtatggtaatgtatgtaaaacgtctggaggccggtcgcttcaagctgccggagtatgatcccaaatcaaacagctatcccatggagtggcgcgatctggtgatgatggttgaaggaatacaggaaaacccggaacagaggctccggcggttaagagccgaacgtaaggaataccatgtataacatgttttttgcgtgagtaaactttggatattgttgcataattcactgttaattagtatatttacatcattaaaagaagtatagacaatggaagaaaaagaaattttactcaagacgatagaagggctgaatgcctctatagcctcattgtctactactaataagaatcaatccgaacagataaaaaatctgcaggaacgtatcaaggagttgacggctcaggtcgcatggctgaaccgtcagctctttggtcgtaaatcagagaaacttcgcgtatatgatcctaatatgccagacctctttgccgacgagttttccggactccggcagcaggcggaagaaaagcgggacgaggctgtggaaaagattgagaaggaatcggtggaagacgtaaaacgaaatcgtcagaaccgcaaaatgatagaggacttgcccgtattggaaaccgatacaatagaaccgaaaggcgtagacttgtctttataccgtagaataggcgaagagataacaaaagtcgtcaaacacaagccgggaatgctttacgtcaaggtgatcatccgtcccaaatatgctctcaaggatagtaccctgcttcctccagccggacagaaaggcgtagagatagctcccatgccgctgatgccggtcgacaagtgcattgctgacaccagcctgcttaccgagatactgcttcagaagtatgaatatcatgtcccgttctaccgtcagatacagcaataccgccatcttggaatgaaaggccttaccgaaagtacactggacggctggttcaagaaaaccgtggaactgcttaagcctctgtatgaagaactcaaatgggaagtcttctcctgtgactatgtacaggcggatgaaactacagttccggtcattaacagagaaaaacacagagccgacaaggaatatctctggatggtaagatcagtcatggagaaactggtcatcttccattacgacgggggatcacgggccggagcggtcatcgaatccctggcaaatcaatataacttcaagggatatcttcaatgtgacggttttgcaggttatgaaacagccttcaagaccaaccccgacgtgcggctactcaactgcctggtgcatatacgccgtcattttgagcaggctttggatgaaaacagggagatggcgcaacatgcactgactcagatacagcatgtctataaaatagaacgccagtgtgacgaagccggcctgtcatatgatgagcgcagacagacgcgtcaggaactgtccaggccaatcatggaggcaatgaaggtatggatggagacagaaggaattaaatacagtccaagttctttgacaggcaaggccataacatatgcctataccaaatgggataatattatgagatgtctggacgatggccgcctgtactgggacaacaatctggcggaaaatgtccaacggcccatcactctgagcagaaaaaattttcttttctgtggtaatcacgaagctgcggttaatatgtctgtcatatgttctctgctggccacatgtaaggcgcacggggtaaatcccagggtatacctgaacgatgttatcgcacaaatgccttatcacaaaaaggcaacccaagaagaacttttgaatctacttccacataaatggaagttgaaacatccggaatgtgtactgacaaggcaaaaggaggaatcttgtaactgatataaattgtaacatatgggttcaacaaaacaatagcggctgatactattaggttcatagtgacagtcgctattgttgtatataaaggtttaatacctgtagttggccgaatacttacatataaattgtaacatatgggttcaacaaaacaatagcggctgatactattaggttcatagtgacagtcgctattgttgtatataaaggtttaatacctgtagttggccgaatacttactttttttaatccttgtatgcttcttcgtgtacccccgctacagcccgtccgctggggtcgttctttccttggaaagagacgtcccatgccagcgcttcggcggtggagcatgccacactgggcacgctgggaacgcttcgggccgcgctttcactggggaaatgctcttcgaagatggtgcgataatagtactcttccttgttttgcggggtatgtactgggaagcgttcggcggcatgtgccatctgttcgtcgctgacggcagcggcagtgacggctttcagcgtatcaatccaactgtagcccacaccgtcggagaactgttctttctgccgccaggcaacgttctgtgggagcatgtcggcaaaggcttcgcggactactttcttttctatctccttgccggggcacatcttgactgccggattgatgcgcatggcaacatccaggaattctttgtcgaggaaggggacacgtccttccactccccaggctgcaaggcttttgttggcacggaggcagtcgtacagatgcagtttggagagcttgcgcacggtttcttcgtgaaaggcttgcggtgtgggcgccttgtggaagtaaaggtaaccgccgaacacctcgtccgcaccttcgccgctgagtaccatcttgatgcccatgcttttgatgacacgtgccagcagatacatgggggtggaggcgcggacagtggttatgtcgtaagtctcaatgaaatagatgacgtcgcggacagcatcgaggccttcctgaacggtatagtttatctcgtgatgcacggtaccgatatgacgggccacttcgcgggctttaatcaagtcgggagcacccttcaagccgacggcgaaggaatggagctgcggccaccaggcatctgccttgttgtctgtctcgatgcgtttggcggcatatttcttggcgatggcagagatgacggaagaatcgagtccgccactgagcaggacaccgtaggggacgtcggacatcaactggcgctgtacggcggcttcaagggcgtcgtgcacagccgtgacttgtgtgctgtaggctgtccggcctatcgaagccggcgcggcattgcgttcggcggcaggagtgtagttgtccttcacagcggcatagtccatccagtcgcgggtgtaccagcggtgcatcttgccctcgcgcccacggtagtagtggccgggaaggaaaggctcatactcgtcgcagaaaccctcaagggctttcagctcactgccgaagtagatgtgtccatccttgtcgcgtcctatataaagggggattacgccgatggggtcgcgagcgatgaggtaatcgtccgtttcttcatcatagagggcgaaggcgaagatgccgttcagctcttcgaggaagcggatgcctttgtctttgtaaagggcaaggatgacttcgcagtcggaacctgtctggaaggcgtattttccggcatagcgggcacggatgtcgcgatggttgtaaatctcgccattgacggcaagcacctgcttgtggtcgggtgaatataagggttgtccgccggattccgggtcgacaatggagaggcgttcgtgggcgaggatggcggagccgcctacgtagataccactccagtccggtccgcgatgacggattttctgcgccatccgtagcgctttgtttctcaattcaggagtttgagactgtatgttgaagattcctgctattccacacatgagaattaaaaattaaaggttaaaaattaaagaaagggaaatcatttcttgttttcttttagaggttcgaggtaacgatctatttctgttgccactcgtcgtccgtcggccaaggcacgtaccacgaggctggcgccgtgggcggcatcgcctgccacgaatacgttttctgcaaacttcggttgctcgggcttgaggaaacccatggcaagaagcaccatatcggcttcgatgacctctttcttacccgtagatttcatggtagggcggttaccgtctgttgccggaagccactccacttcttccacttccacaccgcataccttgccattcttcccgatgaaccgggtagaggcgagggaccatcgacgggtacagccttcttcgtggctgctggtggttttcagtacgacgggccattgcggccagggagtatccgggttgtgtcctatgggcggttggggcataatttcaatctgggttacgctgacggctccctggcgaatgctggtgcctatacagtcggacccggtatcgccgccgccgatgacgagtacccgtttgccgcgggcgttgacgagctggtctttcgggaaggtatctccatccagaatatggttctgctgtgccagcatgtcgagggcaaagtagatgcctttcagctccctgcccggaatggagaggtcgcgggcggtgggcgtaccggtacaaatggcgtaggcatcgaatccgacgggcagtttctgcacatcgacatggactcccatcttgaacaagattccttcggccttgaggattttcatgcggcggtcgatgacggctttgtccagtttgaagttggggatgccgtaacgcaacagtcctcccggcatcggtttgctgtcgaatagggtaacttcgtaacctttggcgttcagccgtacggcaacgctcaatccggcagggccggcgccgatgacggctactctctttccgttgcgttcgggctggaggggggtgatgtagccctcgcgaaaagcagcctcggcaatggcggcttcgttctcgcggatagtgaccggttcgttgcacgagagtttcagtacgcacgacttctcgcaaagggcagggcagatgcgtcccgtaaattccggaaaatcattcgtactgttcagtatttgataggcttcgcgccatttgccccggtagagcgcgtcttggaattccgggtctttattgcccagcggacatgcccagtggcagaagggtacgccgcagtccatacagcgcgaggcctggagcttgcggtcgtggctgttcagtgtctgttccacttggctgaagtctgtgatacgttcgtgtatcggacggtaacccgcctcttggcgggggatattgaggaatgcttttggatctcccatgatgaacaaattaaaaagttaaagaattaaagaatgaaaggggaatttcctcagtctttcattctttcattattaattcgcgattcaataatcgcgttgcatttctgcaatcttctgttgcaatttctgcatctgctcctcttgcagcacttttttgtattcgatagggactacctggatgaactggtcggcatagcgtggccagtcatcgagcatggtgcgtgccagtttggaaccggtgtacaggtagtgctggcagatgagctcgtgcagttccttgcggtaggaggcctcttcgatgaggctcagttccaccatttccatattgcagaaatagtcgaagttgccgtcccggttccatacgtaggccacaccgccggacatgcctgcggcaaagttgcgtcccgtctgtccgagtactaccacgcgcccgccggtcatatactcgcagcagtggtcgcctacaccctccactacggctgtggcaccggagttgcggacggcaaagcgctcgcctgcacggccgttgatgtaaacttcaccgcttgtggcgccgtaaagcagggtgttgcctgcaatcgtgtttttctctgcctcgaagttgctccgtaccggaggcaggacagcgatgcgtccgccactcagacctttgcccagataatcgttggcctcgccttccagcttgaagttgacacccgggacaaggaatgccccgaaactctgcccggcagagcctttgaacttcacgttcagcgtatgttcgggcagccctttttctccgtattttgcggcaatgacaccagagagcatggcgccgcaggcacggtcggtattggcgatggtgtactccagcgagatttctttctggttctctacggcttcggcggcggcatgtagcatctctacatctttcacatggtcgatgccatgctgttggtcggtgacgtggcggatggcggcttcattgtctacgcgtgccagtagtttgtcgaagcttatcaactgatgtttcctgattccgtcatccggcttgcggacgataaggtctgtacgtccaatgatgtcgtccaggcgttccaccccgatttccgccaggtattcgcgtacctcttgggccaggaaagtgaagaagttcaccagatactcgctgcgtccgcggaagcgcttgcgcagttcttcgttctgtgtcgccacccctacggggcaggtgttctggtgacatttgcgcatcattacgcaacccagtacaatcagggcactggtggcgaagccgaattcttcggctccgagcattgccatcagtatgatgtcgcggcctgttttgagctgtccgtccacttgcagcatcacttgtccgcgcaggccgttcagcaccagtgtctgttgcgtttcgctcaaaccgagttcgggcgagatgccggcatagcggatggatgatgcaggagaggctcccgtaccgccctctgcacccgagatgactatcaaatcggcctttgcctttgccacaccggcggcaatggtgcccacaccgctttctgccaccagcttcacgctgatttttgcccgtgggttcacgttcttcaggtcgaagatgagctgtgccaggtcttcgatggagtaaatgtcgtggtggggcgggggggaaatcagcgagatgcccggaatggagtggcgtgtcttggcaatcacttcatccactttgaagcccggcagctgtccgccttcgcccggcttggcgccttgggcaatctttatctgtatttcgtccgcattcaccagatattctgcggtgacaccgaaacgtcctgaggccacctgcttgatggcgctgcgcagactggtgccgtcttcgcgcggtatgaagcgtgcccggtcttcgcctccttcgcccgtattgctccggccatgcagcttgttcatggcaatagccatggcttcgtgggcttcgcggctgatggagccgtaggacatggcgccggtgacaaagcgctgtacgatgttctctaccggttccacccggtctatgctgataggagcgcggcggaagtcgaggaaatcgcgtaggaagatgggagattccttgctgtctaccatggcagtgaactccttgaatttcttatagcttcccaggcgtgtggcaagttgcagtgtgctgatggtttccgggttccaggcgtgcttctcaccatccttgcggaaggcatacagtccgcggttcggcaatagctccgcttcccccttctttttaagaacctccatcccttccttgtggaaggcgatggcgtcgcgtgccacttcatccaggcgtatgcctccgatgcgtgaactcagtccgccaaagtaggcattgctcaactcctcgctcagtcctacggcctcgaaaattttcgcgccccggtaagaacggatggtgctgatgcccatcttgctcataatcttgaacaagcctttgcagacggacttgatatatttcttttcggcagtggcgtagtcgagctgtatttccttttcgttcaccagtttgtcgatgacggcaaaagccatatacggattcagtgcgctggctccgaaacccagcagcagtgcggcgtgcatcacttcgcggatttcgccgctttctacaatcagtgccgtctgcacccgtttgcccacggagataagatggtggtgtaccgccgacacggcaagcagtgacggaatggcggcatgggcggcgtctacgtcgcggtcggaaagcacgatgtagttcactccttcgttgacggattcttccgcctgcttgcagagggttgccaatgcttcctgcaatccctggcacccttttgccacttcgaagagcaggggcagtttcacggtcttgaagcctttgtaccggatgttgcagagaatatccagctgggcgttgttcaggatgggatggttcaacctcaccatcttgcaatggttttcgctgggtgtcagtatgttcatgcctacggctccgatgtattcggtcagcgacattaccagttcttcgcgtatcgggtcgataggagggttggtgacttgggcaaactgctggcggaaatagttgtacagtagttgcggcttgtccgagagtactgccagcggggtgtcattgcccatggagttgatgggttcggcaccggtggtacacatcgggacaatcagccgttccacgtcttctttggagtagccgaagatgcgcagcatgctgtcgtagttctccacgctatgggagactttgcgaccgcttttcagttcgtccagctcgatgcggttgccggccagccaagtgcggtatggtttggcttcggcaagttgtttcttcagttcgccgtcataatatatttcgcctttctcggtgtctataagcagtatcttgcccggttgcaggcgtcctttttccttgatgtctcccggctcgaaatccatcacgccgacttcgctggccactaccatcatgccgccctgcgtaatcaggtagcgtgcagggcgcagtccgttcctgtcgagcatgccgcctgcatagcgcccgtcgctgaaaagcagtgccgccggtccgtcccacggctccatcaggatggagtggtattcatagaaagcttttaaatcttcgctgatgggattcttttcgttgaaagattccggcacgagcatggccatggcgtgcggcaggctcaggcctgacatgatgagaaactcgagcacattgtccagcgaggcactgtcgctcatgcccggttgcacgatggggcgtatctcccggatgtctcccagggcgggagaggagagtacactctcacgggcttccatccagccgcggttgccgcggatggtattgatttcgccgttgtgtgccagcaggcggaaaggctgtgccagtccccaggtggggaaagtgttggtgctgaaacgggagtgcaccaatgccagtccgctggtgaagtagctgttggtgaggtcggggaagtagttgcgcaactgcaaggaagagagcatgcctttgtagacgatgttcttcgtagagagcgagacgatgtagaaatcctcgcgggtggggatgtccgacttgcgtattctgttctctatccttttccttattatatagagtcggcggtcagcggtttcgctttccgtaaatccggtgatgaagatttgcttgatgtccggttcgttggcaagagccgcttctcccaatatttcggggcaagtgggcacattgcgcagatgcatcagggtcaatccatccttttcaatcttttcgataatgacgctcaagatggcagcctggtcttttccgtctttgggaaggaaaagcaggccggtgccgtattttcccttctcgggaacgggaatgccctgcaacagaatgaattcgtgcggtatctgcagcatgatgccggcgccgtctccggttttgttgtccgccccttccgctccacggtggcgcatgttttccagtaccttcaatgccgattctaccagttcatgtgattttcctccctggatattgaccagcatgcctactccgcaggcatcgtgctcgtgggatgcctcatacaagcccaactgtttgggctgtcgctggtaatcctctacttttgctttgttgttaaaaaattcttgtttcatgattataagctttctttattgctgtataatattgtttgtggtttcaaaatgtttggcaaatatatggtattaattgcaaaatgttaatatgtatttcagccttctttcttgcaaaattcctgcgatagaagatgaagttatgaattgatagaaaacaccttctgttttcttttaatcctaaatcaaaatcagacggtttgatttagatttataaattaagccttttgctttcaaaataatactttctttaactttttgatataaaaacaacttttttctattcttttgataaataaatactggaaagattaactttatgttcttaagaatatgtatatttgcagcgcaaaatcaaatactgatacattatgtgtggaatagtaggctatataggtcaaaggaaagcctaccccattcttatcaagggtctgaaacggttggagtaccgtggatatgatagtgcgggggtagcattaatcagtgataaccgacagttgaacgtgtacaaagcgaaaggtaaggtttcggaacttgaaactttcgttgctcaaaaagatatttccggtagcattggcattgcacatacacgttgggccactcatggagaaccttgttccgtcaatgcccatccccattattcctcttccgaacgtctcgccctcatccataacggcattattgaaaactacgccgtccttaaagaaaaacttcaagccaaaggttatgtatttaaaagcagcactgataccgaggtgcttgtacagctcattgaatacattcaggtgacaaaccatattgacttactgacggcggtgcaacttgccttgcaggaagtgattggggcgtatgccattgcggtgctcgacaaggacaatcctgatgggataatcgctgcacgcaagagcagtccgctggtagtgggcatcggtgaaggagagtttttcctggcttcggatgccacgccgattgtggaatatacggataaggtggtgtatctggaagacgaagagattgccctcatccgccggggagagaagctgaaggttgttaacctgaagaatgtggaatgtccgcacgaggtaaagacggtagcgctcaatctcggccagctggagaagggaggctatccgcacttcatgctgaaggaaatcttcgaacagcccggctgcattcacgactgcatgcgcgggcgtatcaatgtggagggtacgaacgtggttctttctgcagtgattgattataagaaacgtctgctggcggccaaacgcttcgtcatcgtggcatgcggtacgtcatggcatgccgccctcatcggcaagcatttgattgaaagcttctgccgtattccggtagaggtggagtatgccagtgagttccgttaccgcgacccggtgattgacagcaacgatgtggtgattgccatctcgcaaagcggagaaacggccgatacgctggccgccgtggagcttgccaaaagctgtggggcatttatatacggcatctgcaatgccgtcggttccagcattccccgtgccacgcacacgggttcctatatccacgtgggaccggaaataggggtggcatccaccaaagccttcacggggcaggtaacggtgcttaccatgctggccctgacacttgccaaagagaaaaagacgatggacgaagggcaatacctggcaattgtcaaggagctggggcatattcccgacaagatggaagaggtcttgaaattgaacgaccgcatagcggaactttccaagatattcacctatgcacacaactttatctatctgggacgcggatacagttatcccgtagccttggaaggcgccttgaagttgaaggagatttcgtatatccatgccgaaggctatcctgccgccgaaatgaagcacggccccattgctctggtggatgccgaaatgccggtagtggtcattgccacccggaatgggctttatgaaaaggtgctgagcaatatccaggaaataaaggcgcgtaaaggcagggttatcgccattgtgacaaagggagatacggtcatcagtaaaatagccgacacttgtatcgagcttcccgaaacaatggagtgccttgatccgttaataactacggtacctttgcaactgcttgcctatcacattgccgtgtgcaagggaatggatgtggaccagccgaggaaccttgctaagtcggtgactgtagaatgaggacatgtacaatttaccatttacaatgtacaatggggctgcgcttgggaggggtaaatgtaaatggtaattgtatgctataataaggaaaagaaaattgtacacttaaaattgtacattgtaaatggtaaatagtaaataaatagatggaacaactgaagcatgaatgcggcgtcgccatgatacgcctgctgaaacctttggagtactatgaagagaagtacggaacatggatgtacggactcaacaagctctatctcctgatggagaaacaacacaaccgtgggcaggaaggtgccggactggcctgcgtgaaactggaagccaatcccggtgaggaatatatgttccgtgaacgtgcgctcggttcgggcgccattaccgaaattttcggtacggtgcagggcaacttcaaggacttgaccaaggaacagctgcacgatgcggactatgccaagcgtgtgctgccctttgcaggggaggtctatatgggacacctgcgttactccactaccggaaagtccggcatctcgtacgtgcacccgttcctccggagaaacaactggcgtgccaagaatcttgccctctgcggcaacttcaacatgacgaatgtggatgaaatcttcgcacgcattaccgccatcggccagcatccgcgcaaatatgccgatacctacatcatgctggagcagttgggacatcgcctcgaccgcgaagtggaacgcctcttcaaccttgccgaagcggaagggctggcaggcatggacattacccgttatatagaaaaccacatcgaccttgccaacgtgctgcgcacttcgagcaaggagtgggacgggggatacgtgatgtgcggacttaccggcagcggagagactttcgccgtacgcgacccatggggcatccgtacagccttctggtatcaggacgacgagatagcggtgcttgccagcgaacgtcccgtgatacagacagcccttaatgttcctgtcgaatccatcaaggagctgcaacccggacaagccatgtttatcaacaaggccggcaaggtgcgcaccgtgcaaatcaataagccgcgcgaggtgaagccttgttccttcgagcgcatctattttagccggggcagtgatgtggacatttaccgggaacgtaaactgctgggtgagaaacttgtacccaacatattgaaagccattgacaacgatgtggaccatactgtcttctccttcatacccaatacggcggaagtcgccttctacggcatgttgcagggactggacgactacctcaacgaggagaaggtgcagcagattgccgccttggggcatagtcccagccacgacgagctggagcatatcttgtcgcggcgcatacggagcgagaaagtggcaatcaaggacatcaagctgcgtaccttcattgccgaaggaaacagccggaacgaccttgccgcccatgtgtacgacatcacttacggaagccttgttccgggagtggataatctggtcatcatcgacgactcgatagtgcgcggaaccaccctgaagcagagcatcattggtatcctcgaccgtctggggccgaagaagatagtcattgtaagctcttcaccgcaggtgcgctatcccgactactatggcatcgatatggctaagatgagtgaattcatcgccttcaaagctgctgtggaactgctgaaggagcgtgagatgcgggatgtaattgccgccgcctaccgcaagtccaaggagcaggtaggcctgcccaaagaacagatggtgaattacgtgaaggagatttatgctcctttcactgacgaggaaatctctgccaagatggtggagcttctcactccgaaaggaacgaaagccaaagtgcagatcgtctaccagcctctcgaggggctgcatgaggcctgccccaagcatccgggtgactggtacttcagcggcgattatcctacgccgggcggtgtgaagctgctgaataaggcatttattgattatatagaacaagtttatcaattttaattgaatcaatgagaaatgtaactctaatcctcgacgacgggagccgcttccacggcaagtcgttcggctttgaaaaaccggtagcgggagaggtggtcttcaatacagccatgacgggttatcccgaaagtctgaccgacccttcgtatgccggacagctgatgacgctcacctatccgttggtgggcaattacggtgtgccgccttttactctcgaaccgaatgggcttgccacttttatggagagcgagcatatccatgccgaagccattattgtaagcgattatagcgaaaattatagccattggaatgcggtggaaagtctcggtgactggctgaaacgcgaacagattccgggcatcacgggcatcgatactcgcgaactgacaaaggtgcttcgcgagcatggggtgatgatgggacgtatcgcctttgatgatgaatcggatgaaatgcctgaggcctcttatgccgatgtgaattatgtggataaagtcagctgcaaggaggttatccgttacaacgaaggaaccggtaagaagaaagtgctccttgtggattgcggcgtcaagcataacatcatccgctgcctgctgaaacgtgatgtggaagtgattcgcgttccctgggactatgattataccgggatggagttcgacgggctgttcatctccaacggccccggcgaccctgatacctgcgatgctgccgtacagaatatccgcaaggcaatgcagaacgagaaactgcccatcttcggcatctgtatgggaaaccagttgctttccaaagctgggggcgccaagatatacaaattgaaatacggccaccgcagccataaccaaccggtgcgtatggtgggtacggaacgttgcttcatcacctcacagaatcatgggtatgccgtagacaacaatacgctgacagaagactgggaaccgcttttcatcaatatgaacgatggttctaatgaaggaatccgccacaaacgcaatccttggttctccgcacagtttcatcccgaagctgccagcgggccgacggatacggagtttctttttgatgactttgtgaagttgctttagtaagagaattttatcaagaatggttacgtttgtaatctcttgataatcagtgtgtaaaagacggtataatgagtcccgtactgaatgtcattcagtcccagagtgaatacctttcagtcctatactgaatgccattcaattagtgactgattgtgtaaggtaagagaaagataaggttttattactactattacatttttaataaacagatatgcaaatgaaagaaaacaatataaagaaagtcctgctgctcggttccggtgcactgaaaatcggtgaggcaggagaatttgactactccggttcgcaggcgctcaaggcattgaaggaggaaggcatctacacggttctcatcaatccgaacattgccacggtgcagacctcggaaggagttgccgaccagatttacttcctgcccgtcactccttacttcgtggagaaggtgatagagaaggagcgcccggacggcatcatgcttgcttttggcggacagacggcactgaactgtggtgtttccctctataaagacaagattttcgagaagtacggcgtgacggttctcggcactcccgtgcaggccatcattgatacggaggaccgtgaaatctttgtgcagaaactgaatgagattgatgtaaagaccatcaagagcgaagctgtggagaatgcggcagatgcccgtcgcgcagcccgggaactgggatacccggtcattgtccgtgccgcatacgcgcttggcggactgggttcgggcttctgcgacaatgaagaagagctgaatgtgctggtagagaaagccttctccttctccccgcaggtgttggtggaaaaatcgctgaagggatggaaggaagtggaatacgaggtggtgcgcgaccgcttcgacaactgcatcacggtctgtaacatggagaacttcgaccccctgggcatccatacgggcgagtccatcgttattgccccgtcacagacgttgagcaatacggactatcataaattgcgtgaactcgctatccgcattatccgtcacatcggcattgtgggagagtgtaacgtgcagtatgcctatgacccgatgagcgaggactaccgggtaatcgaggtgaatgcacgcttgagccgttcgtctgcattggcctctaaagcaacgggttatccgcttgcctttgtagcggcaaaactcggcttgggctatggcttgttcgacttgaacaactctgtaacgaagaccacaagcgctttcttcgaacccgccctggactatgtggtctgcaagataccgcgttgggatttgggcaagttccatggagtggacaaagagctgggttcgagcatgaagtcggtaggcgaggtgatggctatcggccgtactttcgaagaagccatccagaaaggcttgcgcatgataggccagggtatgcacggctttgtggagaacaaggaactggtgattgccgatttggacaaggctctgcgcgaacctaccgacaaacgtatctttgtcatctccaaagccttccgtgccgggtatacggtggatcaggtgcacgcattgaccaagatagaccgttggttcctggagaagctgatgaacatcatggataccagcagggaactgcactcttttatggctgatggagagttgccaatgattcccgtggacttgttgcgtaaagctaaagtacaaggcttctctgattttcagatagcccgtgccctcggcttggaacaagcaatggacggcgaagaagccatccttgccgtccgcaatttccgcaagagtgcaggcattctgcccgtagtgaagcagatagatacccttgctgccgaatatcccgcacagaccaactatctctacctgacgtatagcggcacggcaaatgatgtccgttacctcggcgaccgcaagtccattgtcgtattgggctccggcgcctaccgcatcggttcttccgtagagttcgactggtgcggcgtgcaggccctgaacaccatccgccaggaaggctaccgcagtgtcatgataaactacaaccccgaaaccgtgtctacggactatgacatgtgcgaccgtctttacttcgacgagctcaccttcgagcgcgtgatggatattctcgaactggagaatccccatggggtgattgtctctaccggtggtcagataccgaataaccttgccctgcgcctcgatgcgcagaaggtacctattctcggcacaagcgccaggagcatcgacaatgccgaagaccgtgacaagttctccgccatgctcgaccgcattggtgtagaccagcccgaatggcgggcgctgacctccctggaggacatcaacgcctttgtggataaggtgggcttcccggtactggtccgtccttcctacgtgttgtccggcgctgcgatgaatgtctgctccaaccgggaggagctggaacgcttcctgaagctggcagcaaatgtcagcaagaaacatcccgtggtggtgagccagttcatcgagcatgccaaggaggtggagatggatgccgtggcgcaggacggtgagattatcgcatatgccatcagcgagcatatcgagtttgccggagtgcattccggtgacgccactatccagttcccgccacaaaagttgtatgtggagacggtgcgccgcatcaagcgcatcagccgcgagattgcccgtgagctgaacatctccggtccgttcaatatccagtatctggcacgcgagaacgacattaaggtgattgagtgcaacctccgcgccagccgttcgtttccgtttgtcagcaaggtgctgaagataaaccttattgaacttgccacgaaggtgatgctcggcattccggtacagaagccggacaagaatctgttcgatttggattatgtaggcatcaaggcgagccagttctccttcaaccgtctgcagaaggccgacccggtactgggtgtggatatggcaagcacgggcgaggtgggttgcatcggcagcgatacttcctgcgccattctcaaggcgatgctctccgtgggctaccgcattccggagaagaacatcctgctttctaccggtactccgaagcagaaagtggacatgctttctgccgcgcgtatgcttcagaagaaggggtataagatatttgccacgggtggttccagcaatttccttacggagaacggtgtggagaatacgcgcgtctactggcccagcgaacccgaacgccagccgcaggcacttgacatgctgcaccgcaaggagatagacatggtggtcaatattccgaagaacctcaccgcaggcgagttggataacggctacaagatacgccgtgccgccatcgacctcaatattcctttgataacgaatgcccgtctggcaagtgcgttcatcaatgcattctgcacgatgacgccggatgatttgaccatcaagtcgtgggcggaatataaatgataaatatttttcggacagaaaaacagaaggacaagggagagaagaaaaaatgtgccgtctttttttcccttgtctccttgtcagtcttgtgtattaatatggaaaaacaacgcatacagtaccggtatgaacagcaacgttatcagtgtgccgaatgtcagcccgcccataatggaagctgccagcgagccgaacatggcatcgggcagtaacggtatcatgcccagaattgtagtcagcgccgccatagataccgggcgcaaacgactctgtgaactgtctatcaaggctttcatcggttccactccctgattaatctgcaaggttatttcatccatcagtacgatgccgttcttgatgagcatccctatcaatcccagtgtccctacgattgccacgaaattgaatgtctttcctgtaagcagcatcactgctaccacgcctaccacaaccatcggaatgcagcagaagatgataagcggtttacggtaatccttgaacagcatgatcagaatggcaatcattaggatgatggccagtgggaagttcttgaacagatacttcatggactggtcactggcgcttttctcaccctgccactgcagtgtgtatccctcgggaagctctatcctttcaatctgccgtgcgatggcctgccttgccttttccgtctctatgcccggtgtgggagagcattgcacgcgttggctccgttgtccgttgtagcgcggcactaccgggtcttcccagcgtatgtcgatacttttgctgatttgtttcagtggagtgctgcccatcagactttccaccagctcttctttggagagggtaccggctttcagctttaccattgtttcttcgttcagcagtccgttcagcgatggcagcgaggagaacacttgcgtattggagaggtcctctatcggttgtccttcctcgtccaggcatttcaggtagatattgtcccggtggatgccttcgtagaagaatccgatggggatacctccattggccgagagcagtgacaagcttacgtcattgcggctcaaccccaaagtacgggcggcggcttggtcgtactcgatggagagtaccggaacctgcggttcccaatcggtggtgatgaggcatatctccggtgtgttttccatgatactgcgggcgctgtctgccaaccggtgcagtacggaagggtccggtcccatgaactggacttcgataggatattttttgaacatcaggttgtagcgcttcatcttgacgtaggcattgggataatgatgcgtcaggtaactttgtatctcgtccatgttgtctaccagctcttcgggagaagtgaaatctataatcagttcgccgtatgccaaagacgggttggcgatgctccttaccagattgtagcgtcccggtgtaccgcctatggaagtggtgacgtgcgtcacttccttgcgtgttttcaggtatgtttctatctcccggaggtcttgaaccacttgtgtggagttattgccttcgggcagtttatattccatatatagttggtcgtaaaccatgtcggggaagaatccctggcgcatgtactggtagccgaaggcagacagtccgagcaggacgagcattgtcaacacaaagctccagcggtgtgccagtcccatccgcagggcggcgcgcaagacagcataagtgcgtcctttgtattctctcgctcctgtggcgttggtttcgacggcaggatgcagataccgattggccatcagtggtacatgaaccaacgccagtacccagcttaacagcaaagacactgccaggacgatgaaaaggtcacgtgtgtagacccctgccgtgtcgggcgacatgaagatgggcagaaaagctatgatggctatcagcgtagctcccagcagcggcatggctgtctgtctccctatggctgtcatggcttccatccgtttttttccggctttcaggtctaccagtatgccgtcaatgatgacgatggcattgtctaccaacatacccattgcgaggacaaatgcggccagtgatacacgctgcattgttccgcctgccgtatatagaaacataaatgaaccgaagacggtgaccaccagactgattccgataatgaccccacttttgaatcccatagccaccatcagaatgagcactacgatgatgacagactctatcaggttgatgatgaatgtccccaatgaagcgccgacgcgttccggctggtagaaaaccttatggcagtctacgcctgcaggcagacgggtttctttgagctgtgctaacctcttttctacttcagcgcctactttcacaatgtctgttccgctggaggcggcaatcaggataccttgtgcccgttcgctgtcgaagaacatttcgttgcgggtaggctcttcgtatcctttttctatctgtgcgatgtcgcgcatgcggagctggtcgtcgtcatgtccttgtataagcatgttgccgatgtcctccacagtcttgaatttgtcgcttacagttacacggatgcggtggtcaccattgtcgtaatagccgctgtaagtggtcttgttctgcccgttcagggtggcaagcacctcagctggtttcacacccaaatttgccatgcggtcttgcagcaaggagatgttgatgcactcggagcgttttccgtagagttccacccggtcaattccttccatgtcgctgatttcccgcttcacgagttccgcatagtcggacaattgccggtcggacaagccgtcaccggtcagtgcgtagaacataccatatacattcccgaaatcatctttgacgataggtgtaccggccccgtcgggcagtgaggcacgggcatcgttcactttgcggcgtagcatgtcccagcattgttccacctcatcgtctcgggtggttgttgtcaactctatctgtatcagtgaaaggccgttgtaggagtagctttccacattgtctatgtggcccatgctgcggatgctcttttccagtacatccgtcacttccagttccacttgatgagccgaggctcccggatagggtgtcactaccatggcgagtttcacctttatttccggatcttccagtttgctcatctcatagctggaataagctcctcccagcagcaggacagctactaggaagtatatcagattacggttctgaaatgcccatttacttatatccatagttttttagggattagtggttacaatagtcctccaatatttgttccgctggttccggcgagcggttttacggtttctccgtctttgatgtggtggactccggaagacacgaccagttcgcccggtttcagatggttggagctgatgaggctgcgaccgttgcttgtcaggcgaaggagggtcacttcgcgggcggtaatccggttgtcggacgggttgtagacaaatacctgcgcttttccgtctatttgcagtacggcgccgctcggaacggacagttggcatgaattctcttcgtcgtactggatggtaaccatcgtattcattcccggagagggtacgggctgctgcttgtcggcaagcagttgcaggcgtacggtatagagctggttggcattggctttgggagtgatgcttatcagtttcagccgataggtcttgcctggatagacatcgaatgaacagtaatagctgtggaactgtccgcgccggatgtattccgctgccggaagattgatttccacttcgggcatactgctgctgattatggagagaacaggcataccggcgcctatcgtttcgtgcgcctcaaaaagacgtttctgtacaaagccgttgaagggggcgtagagcttggtgtagttgagctggtccttgtggtgccggtatttggctgcaatctgctttaatccatataccgccttgtcgttggcgctggaagtagtgacggagtctttgtaaagtgacatcacccgtttggcatccgcctttatctgtttatattcggcttctgtggcatccaactgcacctgatagtctgtcgggtcgagttcggcgagcagttgtccctgacttacgcgtgcaccgttctccacatatattttctggatggttccgctgactctgaaagcaaggctgatatcctgtgctgctttcactttgcctggatattgcagataggtctgttcgtctgctgaaataactgtatctattttcactgtctggcagtctcttgccatcttgacctttcccttgcaggaagccagtgagagtagggaaatgcctactataagccaatagaactgtttcattgtatattatttaatcatatgtttttatatatttacaaatataccccgatactgtcaaatggaaaaggtcggaatgtattataatatgttctatcttgtacatccggatataaatatctatttttgtcggaagcatcggaagtgcaaatatacaaaaaagcaagtttatggaaacaattcggattcagcattatcggtctccttatggcgagttgatgctcggctctttaggagacaaactttgtctgtgcgactgggtaagcgaaaagcgcaaggagaaaatcggcaggcggatgcggaatacgctgcatgccgtttatgaggagggcacttcggaagttatttcaacggcaatcattcagttggatgaatattttgcccgtaagcggacggcgttcgacatgccgttactgttggcagggacggatttccagaaaacggtatggcaggagttgctgaatattccttacgggaaaacggtgtcctacggcgagctgtcccgaaagttgggcaacccgaaggctgtacgggctgtagcggctgccaatggggcgaatgccctctccatattcattccctgccatcgtgtggtgggcagcaaccgtcaactgataggctatgccggtggactggcagcaaaacaagggctgctggcattggaagcagactcctgcgatggattgccgaattctcgtgtagtacagctgttttaaggtcagatttgtttctggtattctgccggtgtcatccccgtcatgcgtttgaagaacttcgagaagaacgacggattgggaaagttcagttcgtctgatatttgaaacaccagtagattactgtgtttcagcaatactttggcttcgaggataactgcttgattaatccattgcatcacggtttgcccgcttgtttcacgtatcaccgaactcagatagtgcggtgtcaggcatagcttgtcggcatagaagttgacgctgcgttcgtgcttactgtgttggttcaccaaagcgatgaagcggcggaatagctcttcctggcgtgaaagacgtgccggagttgacttgcatgtgtgctcgtggatatacttaaggttatagagaagtgagacaatcaagtgctgtacggtttcgcggcggtaaggcgaacaatgaagtatgtcccataataaagagaaaaagtggctgatgcgtgtccattccgtgttgttgcatgaaaagagaatcccgtttcgtgtgtaagcttccgtaagaatggaattctgtatcacaggcagaaaatgggcggtaggcatgaggacttggaattcatagtcgggactgatttccagtatctctatcagcgagttgtcgggaatgataataatatcatgggctgtggcttcgtattcgataagattgatagatatccggccactgccctgcatgatacgtataatcctcccttctttggcacggtaaggttgcccggtacggaatagtctagagcccatggcaaagaaactgataaccattcccaaatcaccatttataaatctgtattcagaatgttctataaaatccggattgttgcggatgtcctcgaatgcgacgcttatcggtttgttcttttccatatctttcccgttatgaataatgtatatttccaccgcaaagataataaagtgttcctattatttgccttttcctacgaaatgtcgtactattagaacatctttgcgcacaaatggattgtaagggtataggattatgcctttatctttgcatgtgtatagaacaaaaccatgtagaataaacaagaaacagaatggatatgaaacgaaccgttttcttttttaccctttctcttgccgccatgctggcacatgcccagctcacgttggaggagtgtcagcgccgggcgcaggacaattatccgttggtcaggcaatatggactgatagaaaaggcacgcgagtacgacctctctaatgccggaaaaggttacttgccccagttctccctatccggcaaggccacgtaccagagtgacatcacccggctaccggtcgaaatccctaatctcgacatcaagactgcttcgaaagaccagtaccaggtgatgctcgaagtgcagcagaccctctgggatggtggggatatacgttccagaaaacgattgacgcgtgccgcctcggaagtggaactggaaaaacagcatgtagacatgtatgccttgactgaccgggtgaaccagctctttttcggcatcctgctgctggacgaacagctgaaacagaacagcctcttgcaagaagatttgggcagaacccacaagcaggtagccgactatatagccaatggcatcgccaccccgagcgacctggatgcagtcagcgtagagcaactgaacaccaggcagcaccgtgtggaattggagaccacccgtcgtgcatacctcagcatgcttgctgcctttacgggcaaggatctctcttccgaaacggttttattgaaaccggctgccgaagaaaacatagaccggcagatgaacaaccgtcccgaacttcgttggtacgatgcgcagggagagcaactccgccagcaggaggcagccttgaacacccggttgatgccgcgtttcggcctttttgtacaaggggcatacggcaatccggggttgaatatgctgaaagatgaattcaacgcctattacatggcgggggtgcgcatgtcctggaatttcggcagtctgtatacgttgaagaacgaccgccgcaggatagacaatacccgccaacagatagagaccggccgggatgtgttccttttcaacattcgcctgcaggctacgcagcaggatgcgggcattgtatccatgcgccgccagatggtggatgatgacgagattatccgtctgcgtgggaatatccgccgtgcagccgaggccaaggtacagaacgggacaatgaccgtgaccgatatgctgcgggagattaccaacgaaagtatggcacgacagactaaggcattgcatgaggtgcagttgctgatgaacatctggcagctgaaatatacgctgaacaattagtgactataatccgtaatttataacttgaaatagtatgaaatcattgaaattatttccttttttatttctccttgccgcctgcaccggcggtgctccgaaatatgatgcgacgggaacgttcgaggctaccgaagtcatcgtttctgccgaggcgtccggaagactgctgagtttcgacatcgaggaaggcacgacactgaaagacgggcaggaagtaggcattatagataccgtccaactctatctgaagaaactccagttggaggccagtgtcaagtccgtggaaggccagcggcccgatatcctgaaacaagtagccgccactcaggaacagattgtgcaggcacggcgcgaacgcgatcgtgtgtccaacctgctccgtgtgggtgccgccaaccagaagcagctcgatgatgccgagtcccttctcgaagtcctccgcaagcagctcgacgcccagaactccaccctgcgcaacagcgaccgcagcctcacttggcaaagttcctccgtcggcatccaggtggcgcagatagaagaccagctgcgcaaatgccacatcacctctccgctgacgggaaccgtccttgccaaatatgccgaagccggagagctggctgctcccggtacccctcttttcaaagtggcggatatggagcagatttacctccgtgcctacatcacctccgaacagcttgccgaaatcaagctggggcagcaagtgaaggtttatgcggattatggcaaggatgtgcgccaagaatatcctggcgttgtcacctggatttccgatacctccgaatttactccaaaaactatcttgacgaaagacgagcgcgccaatctggtctatgccgtaaagattgccgtgaagaatgacgggatgctgaaaataggaatgtatggaggctgtaactttaactaatatctccaaacgttacggcagcgtggaagccctgcggggtgtctctctgtcagtagctcccggtgagcttttcggcatcatcgggccggacggtgcgggcaagacatcgcttttccgcatcctcaccaccttgctgcttgccgacggaggctcggcttcggtctgcggcctggatgtggtgaaggactacaaagccatccgcaggcgggtggggtatatgcccggacgcttctccctctatccggacttgacggtagaggagaatctcaatttcttcgccaccgttttccacaccgccatcgaggagaattatgatttggtgcgcgacatttaccggcagatagaacctttccgcaagcgccgcgccggagcgttgtccggcggcatgaagcagaaactcgcccttagctgtgctcttatccataaaccggatgtcctcttcctggacgaacccactacgggcgtcgaccccgtgtcccgcaaggaattctggggaatgctctgccggctgaaggagcagggtatcaccatcattgcttccacccccatcatcgacgaagcgcgccaatgcgaccgcatcgccttcatcaacgaaggggagataaaaggcgtcgatacccctgaccgcatcctgacacgttttgcgggcatcctctgccctccgggcttgcagcacgaacgggtggaaaaccacgaaaacaatgtgattgaagtggaagggttgaccaagcgtttcggcaattttaccgccgtagaccacatctccttccaagtccatcggggcgagattttcggtttcctgggagccaacggggcaggcaagaccaccgccatgcgcatgcttacggggcttagtcgtcccaccggcggcaaggcgtgcgtggcaggcttcgatgtggcttcccaacccgaagaagtgaagaagaacatcggctacatgagccagaaattttccctttacgaagacctcaaggtgtgggagaatatccgcctctttgccggtatctacggcatccccgaagcggagattgctcctaaaacggaggagctgctcctccgcctcgggttggaaaaggaacgtgacacactggtgaaaagccttccactgggctggaagcagaagctggccttctccgtctccatcttccaccgtcccaagattgtctttctggatgagcctacgggtggggtagaccccgccacgcgccgccagttctgggaactgatttaccaggctgccgacgagggcatcaccgtctttgtcaccacccactttatggacgaggcagagtattgcgaccgcatctccatcatggtagatggcgtcatccgtgcactcgacactcccggggagctgaaacggcagttcaatgccactacaatggacgatgtattccaacaactggctcgccaagccgtgcgaaccgccgactgagaatccgtgaaatccgcgttatccgagcctaaatataaatatagacaatgaaacaattcatatctttcatccgaaaagagttcttccatatcttccgcgaccggcgcacgatgctgattctgctgggcatgcccatcgtgcagataatccttttcggttttgccatcaccaccgaggtgaagaacgtgcgtgtggcggtgctcgacccgtcgaatgacgtagttacccgccgtatcatcgaccgcatggatgcaagcgaatacttcaccgtcatctgccgcctgcattctcccgccgatatggaggcttctttcggaagaggggagattgacatggcgcttgttttcagcgagcgtttctcggacaagctttataccggcgaggcgcgcgtgcagcttgtctccgacgccacagaccccaatatggcgactatgcaggcaggctatgccgcaaacatcatttcctctgccgggcaggagatgcttccgccgggagtgcatgccgctgccatcgtaccccagctcaagctgctgtacaatccgcagatgaagagtgcctacaacttcgtgccgggtgtcatggggcttattctgatgctgatttgcgccatgatgacctccatctccattgtgcgcgagaaggagacggggacgatggaggtcctgctggtttctcccgtcaaaccgcttttcatcattctggcaaaggcggtgccctattttgtgctgtcgtttgtcaacttgaccaccattcttctgctttcggtctatgtgctcgatgttcccgtggcgggcagcttgttctggctggtggtgtcgctgctattcatctttgtctccctggcgctggggctgctgatttccacggtcacccggacgcaggttgccgctatgctggtgtccggactgatgctgatgatgcccaccatgttgctttcgggcatgatattccccattgagagtatgcccgttatcttgcaggccatttcagctgtgcttcctgcacgctggtatatccaggcggtgcgtaagctgatgattgagggagtggatgtttcgcttgtgctgatggaggtcggcatacttgccacgatggcggtattgctgataacggtgagtttcaagaaattcaagcatcggcttgagtaaagagcggatatgaattttatattaattattcaggcagaagaacataaggacaaaaggatacgggaaatctgttcttttgttcttatgtctaaaatctttaaaatatcgtcttatgataaagtttctcattgaaaaggaattcaagcagttgttccgcaactccttcctgcccaagctgattttcattttcccgtgcatgattatgatactgatgccctgggccgccaatctggagataaagaacatcaatctgaatatagtggacaatgaccacagcgtcttgtcccgccgtctggtagataaaatcggcgtatccacttatttccgcctgacagcgctttccgatacatacgatgaggctttgctcgccattgaagccggttcggcggatgtcgtgctggagattccccgcgatttcgaaaaggattgggtgaagggagaggcgccccgtctgctggtggcggccaatgccgtgaacggtacgaagggcagtctgggaggttcctacttgtcttccatcatcagtgactatacccgtgaactgggttcggagtcgtcttcgcaagggcttgccgggaagtcgcttccccgggtggatatcgctacacaaaacctttacaatcccactctgaactataagcttttcatggttcccgcccttatggtgatgctgctgaccatgatttgcggttttctccccgccctcaatgtggtgggcgagaaggaggcgggcaccatcgagcagataaatgtcactcccgtccgcaagttcaccttcattgccgccaagctgataccttactggctgataggcctggtggtgctcaccatctgtttcgtgctggcatggctgctttacggcattctgccggcggggcatttcctcactatctatggcatggctctggtgtttctgccggtggtgtcggggttcgggctggtcatatccaatcattcggcaacgttgcagcaggccatgttcgtcatgtggttcttcatgcttatccttatcctgatgagcggtcttttcactcccatccacagtatgcccgaatgggcgcaatggattacccgcatcaatccgctgcgctattttgtggaggtgatgcgtaccatctatctccgtggcggcggatttgccgaactgtttccgcagttgggagccttgttggtctttgcattggtcttcaatctgtgggcggtaaaaagttataggaaaagcagttaactgatttttctatattagcatcccatttggctttttttcttgaagaaaggctacaccatttgccttggatagctacacccttttgtgtttaaggctacaccatgaggaggaaaaggtgtagcccttttattatggataatgaaagctgttttttgtgtggaaagggggctagtagtgatatatatctaatagctgttatacttgttaattaattgatagagtttatatgatatttatcagttcccttattggaaaaaactcttatctttgcgcgcaaattaataaatatcttataccaaaatgaatacacagactacttatcttgcctcgaaaccgcattatgagattcttgacggactgcgcggcgtggcggctgtcatggttattatcttccatctttttgaagcacatgcaggcggcagtcatcttactcaaattatcaatcatggctatctggcagtggatttctttttcatgctctccggttttgttatcggttatgcttatgatgaccgttggaaccggatgaccgtgggcactttcttcaaacgccgtatcattcgcctgcatcctatggtgattatgggaagcattgtgggcgctgcctttttctattttcaagagtcgccttgttttccacctatcgagaatacgtctgttggaaccatgctgctggtaatgttactaggctgtactttgcttccccttccgctgaagttcgacattcgtggctggacggaaatgcatccgttgaatggtccggcatggtcgctctattatgaatatatcggtaatattctgtatgcgttgtttgtacgcaagttcaataaggtggccttatcggtgctggtatttgtggcagggtgttttacggtgtaccgttgtctgactgctcctgctggtgatattgtgggtggttgggccttgaactgggaacagcagtatgtgggcatggtccggctgatgtatccgtttttcggcggattgcttctgtcacgcctcggctggctgatacggcttgaaaagcgtgctttctggtggtgtagcctgctgattgtggtggttctttccattccccgtatcggaggtgaggacggctactggatgaacgggctttacgaggctttctgtattatctgcatcttcccggtcattgtttcaatgggagcgggcggcaaggtgaccggtaagcgctctactgccgtatgcaagttcctgggagacatttcctatccgatttatatcacccattatccactggtatatacttatacggcttgggtatgcaacaataacgctacaatggcagaaggtatcccttatatgatacttactttcgtgggagccgttgtccttgcttatgcttgtttgaaactctatgatgaaccggtgcgcaggtggcttacagaccgtttcctgaaagggaaaaagaaataattcctatagatatggatataaaaaatctcccgttgcattatcttgtgcagcgggagattttctttaatgaccgggcgttattttacgtcaatgaatttcttggccttttctttttctgcttccgtaaatttaggcaatgtaatgttcaacacgccgttttctacatgggcaccaatcttttccttatcgacatcgtccggaagaatcatggtttgctggaacttggtgtatgagaattcgcggcgcaagtagcggccttccttcttttcgtccttgttgttctcttccttactttcagttttcttttccatgctgatgaccagattgttttcttcatcgatgtgaacgttgaagtcttcttttgtcataccgggagcagccaattcaactttgtactctttttctgtttcgaatacgttgatggcaggggcggtggcatttgcttttaccatccaatcattgtcaaagaaatcattaaaaatactcggtaaccaattttggtttcttcttacaggcatcatagttatagtctcctattgtttaagttaaacatgctatttagttttgaactccggttctttgtcttcgggtgtctgccttttgggtttttcaccgtccgtttcttgaaccgtcgttcgctaataatattgcaaaccttatgccaaccggtttttactgactttattgactatttgtcattgaaaaactgacttatttgcctatttaatgccattttgctatcttatttatttaattttgatagtttttcagactaatttaaaacgcattctccaacgcttggcttcttcgtcccaatcgtggctgatgattttaaaagttccgatttctgatgtgttttctacatgtactccaatgcagagacattcgtcgtaatcgcctactttcacgacacgtaccgtttccgaagcatcatcgggcaggcgttccaagtcgaagcgtccttgagcttcctcttgcgtaatgaatgctgttgtgacgggcagatgtcgggcgattacctcgtttacggcctcttccagcttctttatttcttcttccgtggggcaggcggcaagacgatagtccagcttgctcttcttccgttctatgtgtgctgatatggagcggccgcaaccgaataaccttatcatggtctggttgatgatgtgctccgttgtatgcataggagggtactcctgcttgttgtggtcattgagatgaggttgttgttccatgtataatttcaatagttgatatatatttgatattttattgtttgaggttggctagcacttcttctttcaagatgctgtatatatgtatatctgtatattctccagaagccagcagttctccgcaacgttctgttccctcatggatgaaaccgaggcgaaccggtatcgcgttactggctgcattacccacggcacagcgaatttgtatccgctttatctttttttcttgtacggcccacagacacagcttgcggacactttcagtaatgatgccccggtgctggtattccggcagtagccaatagccgagttctgtacggtggttgtcgaaatcggagaaatggaaacctatcagtccgcagatttcatgctgctggttccaaataccgaatataggttcatttcgttcggcaggagcagatagtacctgacgtaaaaaagcttcttcatcagctgttgtgcgcatattatccacaaatggcagccatgttcttaagtaatctcggtgtgtgtcgatggcatagtagatggctgcggcatcttccattctgatttcctgcagataaatgtccggaaggatggggaaggagatgggagaggggaggatatgtacgtctcttgattgggaaagctgtatcctttccttgatttttccccaggcatgtgtatcgaacagacagctttcacgcatggtgtgatacatctccttgaaccgggacatggggatagtgaagctcaataagtccgcttcgaagtatgggcggacggaggggtcgaagaatcccaggaaagtgcgtttcccttgtttccggttttcaatgatggtttgagtaatgacggagcaacagccggagccgaatggggctgccacggcatccaatgcattgttgtcaaaagaagcccatgttgccagtccggatagaatatcgggtgtgggcaggaacagcacgccttccacctcgtcaaaggaaggtatcttgtctatgcgggcaaaatgcagataggctttgtcagttctgggaatctgtagctcattgacaaaatctaccaccatttcgggagtcttcttgtatttctctttcaaggagacaaaacccgggacgcgctcgggcatttctgtaaatccggtatagaacttgcctcctccgcaggtgattgtttcgttgctgagactgacggttttgccgtctctgacttgtttcatgcatttgaagagacaaccggttactttctctgtagatgcctccattcggtctgaataccaaaaggcgatggggagttcggcatgttggccgaaagcttcttgataattggcaataaatgtgtgtatatccatgatgctcggatgatatttatgatatggtctttctttggattttccgtaaaggtaattcaatattttgattcttttgcttgcagtatgcctttttatcactctgctttcgagcttttaatgatagtagaataggtttttatggtattttaattacttttgcatgaggattctcaaaaagtattgcctttaactaatcggaaagccggatgaaaaatataatcatattcttgtgtctttgcaccatctgtatgtgccgccttcatgctgcagacagcagccgggcggattctttgctgctgaaactggaccaggcgataaaggagcgtcccatatatatggagcagaaggagctgaaactggcggaattgaaaagacagttgcatcggcagataccggatgaagaacgttttgccattcttggcacattgctggatgagtaccgttcgttcaatacggattctgcattgcacatggccgaggaaagggaacagatagccatacgtcttggaaaccgggaatacatagacaatgcccgcatgaataaagcagatgttttgggaatgaccggtatgtataaggaagttatggatttgatgcggaatatccatatagaccggttgtcggtggatatccatccatattattaccatatctaccgtacggtctatggccttatggccgattatgccgtgacggcatatgaaaagaagctttatacggagcttacggacaaatatcgtgattcgttgctgttggtcaataaagataatcttctgatacataccttgattcagtccgaccagtataatgtacgcaatgaatatgacaaggccatccgtttgctgacggattatctggcgctgcagaaggactatgaacacgacgttgcgatttgtgcctatactttatcagagtcttaccggctgaaaggggacaaagagaaggaaaaggaatacttgattgtttctgctatggcggatatgaaaaccgctgtccgtgaatatatctctttacgcaagctcgccgtactgctttaccaggaaggagacatcgagcgtgcctattcttatgtaaagatatgtatggaagatgcagccgcctgcaatgcccggttgcgcaagctggagattctggaaatctttcccatcattaatgatgcttaccagcaaaagacggagaagcagcaggagcagatgaaatgggcactggtatctatcagcctgctttcactttttctgttgcttgccatattttatgtatacaagcagatgaagaaagtggctgctgcccgcagggaagtgattgacgccaacaaacggttgaaggagctgaatgatgagcttcacctttccaatgcacaactcaaggaggccaaccacagcattgccgaaaactcctatctgaaggaggagtatatcggccgttatatggaccagtgctcggtctatttggaaaagatggacaattaccgccggtcgctgggaaagattgccgctaccggaaatgtggaggaactctacaagaacatcaagtcttctaaattcatagagggggaattaaaggaattctataccaactttgataataccttcctgcagctgtttcctacttttgtagaagacttcaatgccctgcttgccgatgatgagcaaatatccttgaaagccggcgaacggatgaatacagagttgcgcatctttgcattgatacgtttgggcattactgacagcgtgaagatagcccagttccttcggtattctgttaccaccatttataactatcgtacgaaggttcgcaacaaggctgccggtgaccgcgacttgttggaacaggaagtgatgacaattggcaagtcgaagaactgagaataggggttttgaagcttggaagtgtctcttttacgcttatattttcactacttttttagttgggcaatagctttatatattattggtatatagcagtttaagcctttttgaatgatgtaaaccactacttttttactctttcctccactattggtttctcttatctgatacatttgcattgttcctcttcggaaagagtgacacatgtgatttatgtttttattattaactttaaattcttatattatgcaaaagtacaaaatgccaatcagcaggctacggatgatggtttgtctgataggaatgttacttccgatgtgcatgttcgcacagcaaattacagtacaaggtatagtgaaagaccagaccggtgaaacggttattggcgccagtgtaatggaaaaaggaaccacaaatgggacaataaccggtattgacggtgatttctctttgaacatgtctccgaacggtactcttgtcgtttcatttgtaggctataagactcaagaggtgcaggtgaagggacagaaacagcttcaggtcgttttgtctgaagatgccgaaatgctggatgaagtggtggtgatagggtatggcaccatgaagaaaagcgaccttacaggagcagtgtcctccatcggtaacaaggatatcaaggattctcccgtatccaatttgggacaagccatccagggaaaaatctcaggtgtgcagattgtagatgccggtaaaccgggagacaatgtatccatcaagattcgtggtttgggttctatcaacaactgcgacccgctggtcgtgattgacggagtgcctaccgacttgggcttgtcttccttaaatatggccgatgtggaacgtttggatgtattgaaggatgcttcggccacagccatctacggttcccggggagctaatggagttgtgatgattaccaccaaacgcggtacggaaggaaaaggaaaacttgctgtatctgccaattactcttttcagaatgctacgaacgtaccttctttattgaacgcggcgcagtatgccgagttgagtaatgacatgatggtgaacagtggacgcaatcctaatccggaatgggccaatccttctgaattgggtgcaggtaccgactggatggatgaattgctccgtacgggtgtgatgcagaactatacggtaagttattccggcggtaacgagaaatcccattattatgtgtccggtggttttctggatcagtccggtatcgtgaagagtgtgaattaccgtcgcttcacattccagtccaacagtgatgcgcaagtcttgaaatggttgaagttctccaataacattacgttcagtgccgatacgaagaagtcgggcagctataatataggtgatgcgctgaaagcgctccccatttatccggtgaagaatgaagatggcagttggagtggccctgatggtaactcggaatggtatggcagcacgcgcaaccccattggaccgacggaactgaacaagagtcagactgatggatataacttcctggccaacttgacggcagaacttacttttaccaaatggcttaagtttaaaagtactttcggctatgatgccaaattctggttcatagacaactttacccccaagtataactggaaacccactcccacagaggagacttcacgttataagagcgataacaagtcgttcacttatttgtgggacaactatttcctattcgaccatacttttgcagaaaaacatcgtgtgggattgatggccggtatgtctgcccaatggaacaccaacgactacctgaatgcgcagaagaatgtgtttatgttcgacaatgtgcacgaaatggataatggcgaggaaatgtatgccatcggtggaaacgagacagagtgggcattgctctcttacatggcacgtgtcaactactcttacgaagaccgctatttgctgactgcaaccattcgtcgtgacggttccagccgtttcggtaagaaacatcgctggggtactttcccttccgtatctgtggcatggcgtgcctctcaggaaaagtggtttccaaaaaacgactatatcaatgacttgaaagtgcgtgcgggatacggtgtgaccggtagccaggcaagtgttggaaactacagctatctggcatcctacaataccagtgtatatcctttcggcatttcgagcggcaatcagacagcgctggtttcttctactctcgccaacccgtatatccattgggaagaggtggcacaaaccaacatcggttttgatgcctcactgttcaattcacgcgttatgttctcgtttgatgcttatctgaaggagacgagagacatgctggtaaaggcgtctatccccatcacatcgggatttgaagatactacaaccacgtataccaatgccggaaaagtacgtaatcaaggtattgaaatgagtctgcataccatcaatcttaccggtgaactgggatgggaaacgaacgtgaccgccacttacaacaagaataaaattaaggatttgaacagcgacgttccttattacattaaccaaatcaataactcctatgtaacgatgctggcaaaggactatcccattaatgtcttctacggttatgttacggacggaatcttccagaaccagtctgaagtgaatacacatgccgtgcagccgggagctgagccgggtgatatccgtttcagggatttgaacaacgatggtgtcatcaatgatagtgaccgtaccgtcatcggtaacccgaacccaagttggctgttctctatgaacaatagcctttcctataagggtttcgaactttctgttttcttacaaggtatagccggaaataagatatacaatgccaacaatatcgacaataccggtatggcagctgcctataaccagactaccgacgtactgaagcgttggcaaggagaggggaccagcaattcgatgccgcgtgccgtgttcggcgaccccaatcagaatacacgcgtgtcagaccgctttgtggagaatggttcttatctgcgtttgaagaatatcacactctcatacactttcccgaagcagtggttacagaaagcccagattgagaatgcacgcctttccctatcttgtgagaatgtggctaccatcaccggatattccggtttcgaccctgaagtgggtattaacggaatagaccagaaccgttaccccatttcccgtacgttcagcttaggattaaactttaacttttaatgattgactcggatatgaaaaagataacaaatttactatatatgctggcagtattgttgctggcttcctgcagcgactttctggacaagtctcctaaaaatacggttgacccggaaacgacggtgaccgatgatgtggccattgctctgaccaatgcctgctatcgcacccttcagtcttccaatatgtacaaccagcgtatctggacactggatattgtggcgggtaacagtttggtgggtgccggtggcggtaccgacggccttgaaacgatacaagcttctaacttcataacgcagagcgacaatggcatggcattgtacatgtggcgttctccctgggtggggataggacaatgcaacattgtgttgaatagtcttctggaggctgaagccgtgtcagagagaatcaagaaccgctgtctgggagaggcttattttctccgtgcacattattactatgtattggtacgtctgtacggtggtgttccactgcgtttggctccttataatccgggagaaccgacagacattgcacgcgctacagtcgaagagacttatgcccagataatttccgattgtaagaatgcggttgatctgcttcctgccaagtcttcttacgacgacgagaacgtgggacgtgcctgcaaagatgcagctttggccatgttggcagatatttatctgacgctggctcctaatcatacggaatattatcaggaggtgtctgatttgtgtgatgagataacaaatttggggtatgacctttcttcctgcaagtatgaggataatttcgatgcattggtcaataacgggccggaatctttgttcgaggtccagtattcgggcaatacggaatatgatttttggggaaacaatccgcagtcttcctggctttctactttcatgggtccccgtaattcggactttgttgccggcagttatggctggaaccagcctacagaagaatttgtgggtcaatatgagagcggtgacaaacgtaaggatttgaccgtgctttatgccggatgtccggattttgacggtaaggcttacaaaagctcttattccaatacgggatacaatgtacgcaagttcctggtgtcgaaaacggtttctccggaatacaataccaatcctgccaacttcgtgatttatcgttatgcggacgtcctgctgaagaaggccgaagctttgaatgaaatgggacgctctgaccaggctgccgtgcctttgaatattgtacgtaagcgtgccggactgccggaggtttcgggcttgtcacaggaaaccatgcgtgaaaagattatccatgagcgccgcatggaactagctttcgaagggcatcgctggttcgacatgattcgtgtcaacaatggagagtatgccattaaattcctgcagtccattggaaagagcaacgtgaacaagaaccgcttgctgttccctattccgcagacggagatggatgctaataccttaatggtgcagaacccgggttattaattaatttaatcagaagaatatgaagaaatatatttcacaccttgtatttgccttactgggctgtgcagccttatctgcttgtgtagatgatgattacatgaaattggataaaggacagaatgaacttgtactgacggccagcaagacggaagttgttttgaatgagcaggcacatgccgatgatgccctggagctttcctggactacgggaaccaattatgggacgggtaataaaatttcctatacgctggaattggccaagaccggcagtgattttgcagattcttatgtagctgtggagaatgccgtacaagaatactcatggaaaaagagcgtagaggaattgaatgacatcctgcgcaaccattttggggcaactgccggggagaacatttcgttggaagcgcgcttgacagctactgtaacggaacgggacgaaaaacaggtgtctaccactgctttcagtgttacagcctataaaccgctcacatccaccctttatctgataggtagtgccactccgggcggctggagtgccgatgatgcgacagagatgacccgcaaggacaatggtatctttacatggacgggccggcttgtggccggtgaatttaagttcatcacgaccttaggctcattcctgccctcttacaacaaaggaacagatggattgctggttcttcgtagcagtgatgaccagccggatgaaccttttgttgtcgaagaagaccataattacatcgtcgaagccaatctgtttaccggtgttcttacattgacccagacagagacgttggcacctgcctacgaccagctttattttgtgggtaacgctacggattggggattcgtgaagatgaaacaagatgtgctcgatccatacttgttccgcttcggcaagttctttgaagtgggcaaaggaggggaattcaagttcggaacctccgatggaagttgggagaacatgtataaggccaagaatgccgatgctgcttataccgatacagaagtggtgtttgtgaaagggttcgacccggacaataaatgggtgctgaaagacggggaatgcggcaaggcctacaagatttgcatggatatccgtagtggtaaggaacgcatgatgatgagcgaatttactccgtatgagatgatttatatggtaggtgatgctactccggccggttggacgattggtgatgctacgccgatgcagacaacggataatccgtatgtgtttacttggaaaggtacgctgaatgccggtgagttgaaatttacttgtgataagcaggaagattggaatggagcctggttcatgccggctgtagcagacaaacagcctgcaggagaaacagaaccgatgcttttccttgataaatcagacgaagcgttcaaagcgcaatatctggacgtgatggtaggcggcatcgaccagaagtggaagattacgacagcaggttcctatctgattactttgaatcagctggaagagacaatttcaatcgtgaaacaataggtatctacaatagatgaagaagatagtttatacaacaatggtagccttgctgctggttgcatgcagcaaggagagtgatgataccggtagcggtaccggtggaggcggagagagtggaggggttacggaagtaaccccagtcacctcggacttgacggtcaatctcactatcgacaaggcatgttaccggccgggcgagagtgtttcttttacagctgacgcccttcctgccggagctaaaatccgctaccggacaatggacaaggttgtatcggagcaggctgctgtcggtactacttggacttggactgctccggcaaccgattataccggttatctggtggatgtataccgtacaaaagagaatggaacagaggttattcttggtactattgccgtagatgtatccagtgactggacacgttttccacgttatggtttcgttgccacttttgatgcttcgaaaaaggtggatggagtgatagagaaggagatggctttcctgaaccgttgccacattaacggggtacagtttcaggattggcacaacaagcatcattggccgttgggcggtacgcgtgagcatctggacgaggtctataaggacattgccaaccgggaggtctataccgaggtagtgaagaagtatatctctacacaacacagcctgggcatgaagtccatgttctacaatctatgtttcggagctttggacgatgccgtttccgacggggtaaaggaagaatggtacatattcaagaacacgggacgcatggataaggattcgcatgacttgccctccagttggaaaagtaatatcttcctgctcaatcccgccaatacggaatggcaggcatatattgcccagagaaacgatgatgtttatgccaatctggactttgacggttatcagatagaccaactgggaaaccggggtgaccgctatgactatgatggcaataaggtaaatctgcctaagggatatgcctcgttcatcgaagccatgaaacagaagcatccggacaagcgtttggtgatgaatgccgtctccagctatggagcttcccagatagctggtacgggtaaagtggatttcctttataatgaagtatggggcgatgaggcaggcttcaaggatctgcacaccattatcaaagcgaacgaccagtatggcaaccatgccttgaaaacggtgtttgccgcatatatgaactatgacaaggcaggtagcagtaccggtgagttcaatacaccgggtgtgctgctgacggatgctgtgatatttgctttgggaggctctcatttggaattgggtgaccacatgctatgccgcgagtactttccaagcacggctttgcagatgaacgatgtactgaaaatagccatgattcgttattatgactttatgacggcttatcagaacctgcttcgtgataaagatacggaggcggagatttccgtttctctgaactgtacggatgctgcgcggaatctttctctgaatgcatggccgccgcagaagtctgccatcactgtatatgccaagaatgtaaatggcaggcaagtcattcatctgctcaacttcctcaatgcggataacttaagctggagggatctgaacggaacaatgcccgaaccgcgtctggtgtccgacgtgccgttgaagatgaatgtttccggtaaagtgaacaagatatgggttgcatcgcccgatttccatgccggtgcttcgcaggaactggcattcgaacagaaggacggcacggttacctttaccttgcccttgctgaagtactggagcatgcttgtgatggaataagaatatccaataaaggaacaaacaaattatagtaatgaagaaatatatatttttattttttgccgtctgtgcattttcagtatatgcgaatgcacagaaccgcaccggagactgcacttcctataccagtgacgaccggagtgtgaccttctatttaaatgacagttctgccatacaattacgtctgtgtagtcagtctacggtacgtatatggttttctcccgacggtagtttccagcggaataatccttcctttgccgtcgtcaatgaggacctggaggatgtcggtaccgtccatgtggacgaacagaatgcctgctacgagatttttacccctaaactccgtatccgggtaaacaagtctccgtttaacttacagatattcgacaagtatcagaaactgctgttcagtgattatgccgataaggggcatatcagtaacgggcagcgcaaattggaatacaagaccctccgtcgtgacgaacacttcttcggcttgggagaaaagaccggcaagctggaccgtcgcggcgaagcctacaagatgtggaacagtgacaagccttgttatagtaccgttgaggacccgctctacaagagtattccgttctttatgagcagttatcgttatggtattttcctggacaatacgtataagaccgaatttaagtttggtacggaaagccgcgattactacagtttcgaggctcctgggggagagatgatttattatttcatcttcgggaaggattataaggaaatcatgaaacaatatgtcgacctgacgggaaaacccataatgcctcctaaatgggcattgggctttgcacaatgccggggactgctgacgagcgagaaattgtcttatgaaatagctgaaggctatcgtaagcgtggaattccttgtgatgttatttaccaggacataggctggacacagtatttgcaggattttgagtggcggaaagggaactacgagaatccgaaaaagatgcttgcagacctcaaggatatgggcttcaaggtggtggtttcgcaagatccggtcatttcacaagccaataagcggcaatgggaggaagccgataggttagggtatctggtaaaggactccaccaacggcaggagttatggcatgccctggccctggggtggtaattgtggagtagtggacttcacccttcctgctgtggcagactggtggggagcttatcagcagaagcccattgatgatggcattgccggtttctggactgatatgggtgaacctgcctggagcaatgaggagcagacggaacgcctggtgatgaaacaccatttgggcatgcatgatgagattcacaatgtttatggtcttacgtgggataaggtggtgaaggagcagtttgagaaacggaatcctaaccgtcgcgtatttcagatgacacgtgccgcttttgcgggcttgcaacgctataccttcggctggaccggtgactgtggaaacggtgatgacgtgacgcagggctggggacagatggccaatcagattccggtactgttgtctgccggtttgggaattattccttttactacttgtgacattaccggttattgcggagatatagagaattatcctgcgatggctgaactttatacgcggtggatacagatgggcgctttcaatcccctgagccgcattcatcatgagggcaacgtggctgtggagccgtggctgttcggcgaagaggccgagaagaatgccaaggcagccatcgaattgaagtatcgtcttttgccttatatctatacgtatgcccgcgaagcacacgaaacggggttgcctctcatgcgaccgatgtttctggaatatccggcagatatggaaacgttctcaacggatgcccagttcatgtttggcagcgaactgctggttgctccggtggtaaagaaaggagcgcgaaacaagaatgtgtatcttcctgaaggaacttggattgactacaacaacaaacacacagcatatagcggtgagcaatggatgacggtggatgctcccctcaatactattcctatgtttgtaaagcagggaagtatcatgcctcaaatgccggtcatgaactatacggatgagaaaccggtctatccggttacgtttgagatatttcctgctgcagcgggcagtgaaactaccttctcgctttatgaagatgcaggaactgatttaggatatttgcgtggagagttcatgcgcactcctattacttgccagactaccgacaaaggctatacgctgaaagtaggtacacggactggtgagaaatatagcttacccggccaacgaaacctgatgttctgcatctatacggaacagatgccgagaacagctttgctggacggtcagaaaatcaagaaaacgaatgtcggaaagctggaagaaaatcgggagacagagtttacgataactacctggtgtcctgacaagaagctggggacttgcctgctgaggttgccggatgatggaaaggaacatatcattgagtttatctattaacacaaaaaacatatcattattatgaagaaatttgtacttagcgcggctttgcttttttctgccctggcggggaatgctgaaggcatttcatccccttcgggcatggtgaagctggattttgaactgacaaaagacgggagaccagcctatcaggtggattataaaggggctcctgtcatcaatcccagtacgttgggattggaactgaaaggagctaccagcctgatggatggtttcaaagtagtaaggacttctacttccactttcgatgaaacctggcaaccggtgtggggggaaacaaaagatatccgcaaccactacaacgaattgctggtagaacttgaacaaccgtctaccactcgttttatgaatatccgttttcgggtatatgatgacggcgtgggattccgttatgagtttccgcaacagaagaatctggtttattttgtgataaaggaagagcattcccggtttgccatgaccggcgaccatactgcctggtggattccgggagattatgatacccaggaatatgattacacggagtccaaactctctgaaatccgtggactgctgcagggagctgtgagtgacaatgcgtcacaaactgtcttttcgccgacgggtgtccagacttccatacagcttaaaacagctgatggagtgtaccttaacctgcacgaggcagccttggtagactactcttgcatgcatctcaacctggatgacaagaacctcgtttttgaatcctggctgactccggatgcccaaggaaataaagggtatatgcagtctccctgccatactccctggcgtacggtcatggtcagtgatgatgcccgcgagatactggcctccaatttgattctcaatctgaatgagccttgcaagtatgatgatacctcctggattaagccggtgaaatatgtcggcgtatggtgggaaatgattgcagggggaaagccctgggcatatacttttgacctcccttctgtgaaactggatgatacggactattccaaggtgaaaccgaacggcattcatccggccaacacggctaatgtgaagaagtacatagactttgctgccgaacacggttttgaccaggtattggtggagggttggaatacgggttgggaagactggttcggtaattccaaggattatgttttcgatttcgtgactccttatcccgattttgacatcaagtatctgaatgaatatgcccattccaagggcgtccgtctgatgatgcaccatgaaacatcggcttccgtccgtaactatgagcggcacatggaagctgcctaccgtctgatgaataaatatggatataattcggtaaagagtggctacgtaggcaatatgattccccgtggcgagcatcactatggacaatggatgaacaaccattacctatacgccgtgaccgaagctgccaaacacaagataatggtcaatgcccatgaagcggtacgtccaaccggtttatgccgtacctatcccaatctgataggcaatgaatctgcccgaggcacggagtacgaggcttttgccggtaacaagcccttccacacaacggtacttccgtttacccgtttgcagggtggtccgatggactatacgcccggtatctttgaaatggacatcaataagttgaatccgaacagccatacgcatgtcaatactaccttgacgcgtcagctggcactttatgtcactatgtacagccctctacaaatggctgccgaccttcctgagaattatgagcgtttcatggacgctttccagttcatcaaagatgtggctgtggattgggacgacagccgctatctggaagctgagccgggacgttacatcactgttgcccgtaaggcaaaaggtacgaatgactggtttatcggttgcaccagcagtgagcacggacatgcttcaactctgaaactggacttcctggatgcagacaagcagtatattgcaaccgtctatgccgatgcaaaagatgccgattataaaacaaatccgcaagcttatgttatccgtaaaggtatcgtttctcccaaaacggtcttgaaactgaaagctgcctccggtggtggctatgccatcagcatcatggaggtgaaagataaatctgtattgaagggactgaagaggctttccgggaatatctgatttacgggcataaaaaaaggagtaccgctgtactccaacctttgttaaccttaaatctaatactatgaaaaacacatttcaaagatacggacttctgataaatctgcaaattatccaactaaaaaagtatgttttataacacttattagctgtttattcctttgcttctatttttgttaacaaaaaggatgcgaatgtgtcaaaagcacatgaagacttttataatgttataatattaggcgcggattacgcggaataacgcagattcaataaactgaatccgtaaaatctgcgttatccgcacctaaaataaagcgttaaagaaggttttgatacattccccttacccttttgcttcctgatacataaatcttttaatgctcttctttgctgttttctcgaactcctcgaagtgtatcttgacttttgtaatctggctgtaggccggtaattgcagattcaattcattccgattgttctccataaccttttcgatgtccgattgttccataccgtgggcgaatgcatcgtcaaagtccggatagataagagccacgagcttgtcgttctgcaatacgatcagtgattcggacacatagggcatgttattcagtttgctttcaatctcttcgggatagatgttctggccgctggctgtgagcaacatgttcttgctacgtccgcggacagtgacatatccttcggcatccatcgttgcaaggtcgccggtgtgcagccagccgtttacatcgatgatttgggaagtcgcttcggcatttttgtaatagcccagcatcagattggcacctttacagattatttctcctgccacgttctgagggtcgggagagtctatctttacttccatgcgggtggttgccttgccacaagaggccagtttcaatgtttcccagcggctggaacaaatgatggggccgcattccgtcattccgtatgcaatggtataggggaagcctatctgcttcaggaagcgttccacttcggcattgaacggtgcccctccgatgattatttcatcgaaattactgccgaatacttccattgcctttttgcgcatgtcagccttgattttatcgttgacaatgggcatccgcaatagcagcttgcctattttattgtctatccggggcaggatatccttcttgataatcttttctacgatgagcggtacacacgaaatgacccgtggcctgatttcggagaatgactgtgcaataatcttgggagacggcatacgggtaaggaaatacagatgggcgcctgcggaaaaaccgtatagaaaatcgtacaccataccaaatacatgtcccagaggcagcatggatacaatatggtcgcccggacgtacggggagcatctcatggcaatatgcaacattggaccaaaggctgcgataggggagcatgacccctttggaatatcccgtggtgcccgaagtatagtttatgacagccagttcttcgggtgattcctccttgcggtagctgatatgctcggggcggaaattcttggggaaacgtgtgccatagaggacgttgcgatgttcgaaagcctccatcagctgctcgttgcggcaaactaccggagtgaagtccgtcagcagtacgatacccatcagcaggggcattgcctcttcattgaggttttcccatgcccggtcgccgacaaacagcagcttggcttcggaatggttgacgatgttgtggatattgtcggccttgaactcatgcagaatgggaacgatgacagctccataggtaactgtcgccagaaaagcgactgcccaatgtgcactgttacgtccgcaaacggcaatcttgtcaccgggcctaatgccggcgctttccaatacgatatggaatttggctattttccgtgctacatctttgtattgcagtgtaattcctttgtagtctgtcagggcgttgcgatcccagtttttaataatgctttgttctatataatcgatgaacccttgttcttgttccattcagctgttgcacactttagttaaaactgcgcaaagataggtcttatagtgatgcaaagcaaatagtttccacttttttcttgccctgaaacggatagaaacttatctgtaattcttattccttgctattttccgaaataagaagcagcttgtcaccggcatgaagttttaatgttccgttcggaatgaggtactcatcgccacgttttacaatcatcaccagtgtgcctttgggcaggttcatgtctttcagggtgtctgcctgctccagcatttcttgtgtaatggtcatgtcgtgcaggttggagtcaatctcttcgggcagctcaactccgaaatcatttccggtcttttccagcggggtggagaggcccagcagccgggctacccaggagactgtggtaccctggatgatcagtgagacgatggttatgaaaaatacgatgttgaagatgacatgggcaccgggcacattagccaccacgggataggtggcaaagataatgggtactgcgccacgtaatcctacccacgatacgaatagccgtgacttgagggtgattctcttgccaaaaggcagcaggcagagaaaaacgctgagaggacgtcccacaacaatcatgaagacgccgatgagcaatgccacgactgccacttccagcatctcatgggggttgacgagcagaccgaggcagaggaacatgatgatttggaaaagccaggtcagtccatccataaaagtataaatctctttccggtgcatgattttgttattgcctaccatcattccggcgatatacacggccaggtaaccgttgcctttcagcaggtcggtgatggagaaagtgaagaatacaaaggacagcaacaggataggatagagtgcctggttgtctatattcagccggttcagcataaggatagccagctttccgaggaaataaccggttgcggcaccgacaatgaactgtatggcaaaagagcctaatatctggggaactcccattccggaggactggatgaattgaatcagcacgattgtcagcatatatgccatcgggtcgttactaccgctttccagttccagcatggggcgcagattatgcttcaggttcattttttgtgaacgcagaatggcgaatacagaggctgagtcggtagatgacatggtggatgcaagcaaaagggaggttatcaacggcaggtggatgttggtccagctcatgccggacagccaccagataaataatccggtaaagagggccgtgagcagcactcctgcagttgacaaaacaatgccgggagtcaatatgggctttatctccgtaaacttggtgtccatgccaccggagaacagaatgatgctgagtgcaaccatgccgatgaactgtgcttccttggcgttgtggaactgcaatcccaatccgtcactgccgaacagcatgccgacgacaagaaaaagcaataacgcaggcactccgaaacggtagccggtcttgccgacaatgatgctgacaaaaagtaatacagaacctataagtagtatgtttcctgctgtaaatatcataaattctatgctatatagtttgaaatgtgatgtttcttatgtctaatagtacaaagatatgcattgtgtttaacaaatacaaatctaaaatagttcaattgaactttaaaataaaggtggtttctttactgggcaataaggataaatttccaccggaaagcctcattatttgccgggaaatactcaatccaataccgcttccaccctctttggtcgtaaagaaggggataaatatgtgttcggcaatgtcattgggaatggcaggtccgttgttggaaatttctatcagtatggcttccgcctcattgcagtaggcacgtatgttgatatgtccttctttatctgtatttttatccgattcgatggcttgtatggcatttttcagtaagttgatgactacttgtgataccaggttctcatcggcatatagaataaggtcgcttggcgcgatgtccatatgaaaggtgacccgaacatcggggtgctggtgacgggcgagttcgaccatccgtccgataaaactttttacgtagaacaaggatggttcgggggtgggaatacgggtgaatttccggtatgattccacaaaagagagcaggcccttgcccgtactgctgatagtctgcaggccgtttctgatttcttctttggaaacttgcgcttcggtcagtcccagcagtgtatcgctcagggaggttatgggagtgacagcgttcattatttcgtgcgtcagtacgcgggtaagcctaatccaggaatctatttccttttcatccagctcgttgttgatgtcgttcagggcgaggatacgcagatgctctttacggactgtaatgtcgctgacgcggacagacatgtttacagtgcctcgttcgttgttgaaaggcatttgcaatttgtctcccgggcggcaattggcaagaagggacgaaagacgcgggtctacgcggttcagctggctgacgtgggtaaagacattgaggcccagcaaacggagggcttcactgtttttttgatatacggcaccattgtcgttcaggacaaggataccggtattcacgcagtccagaatgagttcgtagtacttttcttgctgggctgtttcacttttcacattataaagtatatgggcaacccggttcaatgcacggttcacgaggcgtgcgtcggcagtgttttccgtttcggagaagtggatggcattgtcgttgttttcgatggcgtcgagcatgaaaagcaccttccgcacatgatggcggtatagcctttgctgccagtacagggctatgggaagcagcgcagtgcagaacgcgccccaaaatacgtctacagtccacatcacccctgcaaggagtgctactgccagactgacggcaacgcggaatgaataattaaaggccatacttcttcattttgttgtacaacgtctggcgggtgatacccagctgtgcggcgacggcagagagatttccgctgcatttgtcgagcgtcttccgtatcatctgcatttccatttcttcgagcgtggatgcggttgcttcgggagtgccggttcgccgtgccagctggaacagttctgcaggaagggtttcgttgtcacagatgataatggctttttcgatggcatgttccagttcgcggatattgccgtaccaggggtggagcgtaagcttctcgcaggcgccgtccgtcagcttgacggggggcttgtcatattgcttgcagaagcgggcgatgaaaagttctgcaagggggatgatgtcttcgggccgctcgcgcaacgagggtatctcaagatgtatcgtgttgatgcggtatagcaggtcctcgcgaaattcgccttttgccaccatctcgggcagattgcggtttgtagcgcaaatcagccgtatgtctacgggaatgggagtgttgctgcctacacggacaatgctgcggcgttggatggcggtcagcagtttggcttgcagatggtaggggagattgcctatttcatcgagaaagagggtgctgtggctggctgcttcgaacttgccggcacggtcggcatgggcatcggtgaaagagcctttcacgtggccgaacagttcgctttcgaaaaggctttcggtgactgcacccatatccacacttaccatgtcctgccggttgcgcggtgaaagggagtggatttcgcgtgccagcatctctttaccggtgccgttctcgcccgtaataagaatattggcatcggtagaggccactttttccaccaagaggcgaagttgctgcatggcggagctgtttccccaatacatgttgcggatatccgcaagcgggtggttgttttctgccgtacgtctggcatttgggccgttggccggagattttgtttcagaagctgatacggcattcagtaaggtttccaccagtttctgattgttccagggtttcacgacgaagtctgtggctccttccttgattccccgtacggcaaggtcaatgtcggcataagcggtaaacagcactacgggcagggtgggacatagcttctttatttcatggagccagtatagtccctcgttaccggtgttgatgcccgaggtgaagttcatgtcaagaagaaccacttgccatgacttttcccgcaatacgctgggcagggttacgggagagggaagtgtgattatcccttcaaaatatggcttcaacaaaagctgcaaggcggtaagtacgcctcggttatcatcgacaatcaggatgtttccgtttttttttgccataaactatttctgttttctgcaggcaaagttaatgatttatctgtattatatgctttattttatatttttgcttactaagaattaatcgtccgacagttgttgaattatcgtccgacagctgtcggacgataattcaacaactgtcggacgataatataacgattgtgggacgaatagatttaagtaaaacagaaattagtttgtagcaacttcagtaagagctcatggcggtactgaaaaaatttatagcagttgcagtttgatgccaaatgacaagctcagataatccttgggtttcagatacttgttggtgaaggcgctgactacatataggtcacatgtacttatttcatagaagaaagtgatttctttggccgtgaaccgtcgttgtgggtcgatgtcgtaagtgatgcgctgtcctaagaatacatggatgcgtaccttggaggagaaaccataatatcctttagggtagcgttccggctcattgacccagaactcatcgccgaataccgtgttcagatacatgccgcaagccagcggttctacagaaaaacggctctgttttatttgcaggctccagggaaggtagttctgcttgacagtgaatgtcagcttggtacgtttggagtcatatttgggcaatactccgaagaatacgtctgtttcccattggtttcttctgccgtaatcccatccggtaccgaatgacagcaaccccatattgccggcaaactgaattttggtgtgcgtcggaatcaaggcctcccaatgcctgcggtagcggtgtacgcggcggtcataacggttctccctggttcggctttcaatgacggcatccggttgcgggtccatccatacagtatcgtgttctatgatgaagatggtatctctctcttgtgaaaaagcagaaaaagagcataccgacaagaagacgacggcgcatgccaggtgattaataatatgccacttcgcgttcatatccgtcgggggttatggtgaatatatagtaattgcggttcttcatgcagtcgctcatgtaatacattatcccatcttcaaagaggtctttctcgaagcgatggtgttcgtgtgcggatgtacagaactgcagtccgggaaattccttgatgtaacgctggaatacgtgtgccacattattgttgaactcgttgcagaacgggcgtatatgcatggacacaacggttttatcgaattcctcttcacggtcgcgtatctgtgcggcaagaaactcgaagtcgggaatggggcgggagtagtcaaattcgatggcgttggtattcaggcagacaaactttacccgtcctgcaatgaaggagaaattggggtctccgaatattgcacgataagtctcttcgcccgtgcccaggcagtcgtgattgccgagaagtaccacatagggtatcttgagtttgttcataatgtcccgttgccaaaggaactcgtctgttacaccgaagtcactgacgtctccgccatgaatgacgaaatctatgtcgtcccgcttgttgaggtggcttacaaagtcgtcggtctcgtcataccagcgctgggagtcacccattgttacgaaccggattgttgtcttgttctggcagttctgctctatttgggcaatgttgtgggcattgacatcggtttcaccgctgatgtgtacatcgtaagggtgataatctatcatgtcgcagccggctataagcaggcataggaatgaaggatataagagtttggggaatttcatgtgcaggtgcttcattttacgtttatactctatctttagaaaactgtgggcaaaggtaaagttttcattcttatggattcttttctaatttcccttttttttgttctatgaggctgaacagagattcggcctctgtctaatttttagacgggagtgtctaaaaattagacacctttgtcttcttttgaaatacgatatgtgctgataatcaggtttgtgtattctttggcacgctttctgcaatatgaaaagcaagaaaataaatctaataaacgataaacggaatgaaacaaatctattatgtaattcagactttactgcggggacgcggttcgaatatcatcaaggtcatttctttgggattgggattgacgatgagtattctgcttttctcccgcgtggcatatgaacagagttttgacacttgcttcaaggattatgataacttgtatcaggtatggtcgatattctcggtgaaaggagagaagtttgagcctcaggagtggaattgcggtcccgtggcaggggccattttggagaacttccccaaagaggtggagtcggcagtaagtttgagcacgtctatggtatctgctcctctttacaatggaagcgtgcgtcttgatgacaggaagattgcagccgattcgctgttcttccgtaccatgggtatcgacgtcctgaacgggaatcccgaaaaggacttggtgcagaaggatattattttcttgagtgaacgctttgcaaggaaagtgttcggtgaggagaatcctatagggaaaacgcttaattatgaccatcagtttgacctgacggtgaagggaatctatgccaatttgcctgagaacgccacaatcaatccggaagcggttatctcgatgcctaccttgtggagccgcaactggaataactactcgtggagcgggggagacagttgggtagagtttatccgttttcgtcccggtgccgacaaatctgttgtcaatgcgcgtattgatgccatgatagacaaatatcgcccggcagaagataagaaagagtacggctacacggcttttgtgcagcccatccgtgatacataccgcaattatgatgatgtgcagcggatgcgtgtcatcatgagcattcttggttttgccattcttttcattgcggcgttgaactatgtgctgatttccatttcttctttgagctaccgcgccaagtcggtaggcgtacataaatgcagcggtgcgagcggtggcacggttttcagcatgtttttgctggaaacgggtatcatcattgtggcggcattgctgctgatggcgttgataatgctcaacttccgcgattttgtggaagacacggtcgttgtaaagctctccaccttgttggctccggagcgtatctgggtaccgttgtcggtagtgcttctgctgtttatagtgggaggcgtgttgccgggccggctctttgcgcgtattcccgtgtcgcaggtgttccgccgctataccgaggggaaaaaggggtggaagcgtccgttgctgtttgtccagtttgcaggcgtggcattcattagtggattgatgtgtgtggtgatgtcgcaatatcagtatgtactgaaaaaggatatggggtataatcccaagcagatagccataggcaatgcctactgggataatgaagcgacgcgtgacgcggcttatcagttcttcaagggattgccctacgtggaagcggtgtccagcgccaacagtacgcccattagcggatatagcggttcgatgattcatagtgagagcgggcaggcacttttctcttgccgttcttcttatttcatgcgcgaggactttcctgctttgatgggcatgactatgaagacgggacgtatggcgcgcgataaagaggaagtcgtggtgaacgagacctttgccgagatgatgcgttggggagacgacgtcgtgggccgtacggtatataccgaagggaatacattcaaggtcgtagggcagttgaaggatttccagatagagagtttcagaaccgagaagatgcctttcatagcccgtgggaacaagaatttttatggaacggtacatgttcgtttgaaagaaccctttaccgaaaatctgcagaagttgaaccacgatgtagccgaggctttccatgaccagaccattgactttaccggttatgagaaaaggatagagaacagctataattctgtccgtgtattccgcaatgccactttgatggcggcagtgaccatgttcttcatcatgctgatggggctgattgggtatactaccgacgaggtgcgccgccgcagtaaggagattgccatccgtaaagtgaacggggcagaggcttccggtatcttggaaatgctgtcgaggaatatacttgtggtggcggctccggcagttgtcatcggtacggtattggcatggtatgtcaacggaatgtggatggaacagtttgcggagcgtattcccatcagttgggcagtatacgtactggtagtgatggtcaatttggtgattatcgtagcctgcgtactttggaagtcctggcggatagcgaacgagaatccggtgaatagtattaagagcgaataaaacaatattaaaacattaaatatcatgattgagattaacaacatcagcaaagtattccgtacttcggaagtagagacggtagcattgaatcacgtaaacctcgatgtaaaggagggagagtttgtagccattatggggccgtccggttgcggcaaatccaccttgctgaatattctgggactgctggacaatcctactgagggcagttacaagctactcggccaggaagtggcggacttgaaagaaaaggaacgtacacgcgtacgtaaggggaaactgggattcgtgttccagagcttcaacctgatagacgaactgaacgtctacgagaatgtggaacttccccttacgtacctcggcgtgaaggcaagtgagcgcaaacgcatggtagaggatattctgaagcggatgaacatcagccaccgtgccaaacacttcccgcaacagctttccggcggtcagcagcagcgtgtggcgatagcccgtgcggtcgtaaccaatcccaagctgatactcgccgatgagcctaccggtaacttggactccaagaacggagctgaggtgatgaatctgttgacagaactgaataaagagggtactacgattattatggtgacccacagccagcacgacgcctcgtttgcacaccgcacgatacatcttttcgacggtagtgtggtggcaagtgtggcagcacaggatttgtaacggacttttaaaacaacttccatgagacaactatattacactctccagacattgatacgaggaaaaggctccaacctcatcaagattgtttccctgggactggggttggcagtcagtatcctcattttttcccgtcaggcattcgagctcaattatgatacctgctacaaggaccatgaacgtttgtgtcttgtcaaaacagtatggtattacaacaacgagtatcatccttcgcatataactcttggaccggtggctggtaccattgccgaaaacctgcctgacgaggtggagagtgttaccgtcacccagcaatggtggagcaattcggcttggtttgccaatgaacgccgtttccagaccaatgccatgacggccgattcttgtttctttgccactatgggcattgatgttgtcagtggagaccctcgcgagctgaataatccggaggtggtcttcatcagcagggagctggccggcagcatgtttgccgataagaatcccatcgggcagacggtggtctataacaaacagatgccaatgaccgtgaagggcatttttgaagattttcccgaaaactccagtttctatggaagtggtgtcgtgatgtctctggctacctccttcaagcatcattggggatactggggatggggaggtggagacagctatatgtcctttgtccgtctgcgcccgggggtgcaactggacgatgtgaacacccgaatagagaaacttgccgggcaggtgcgcaagagcgatgatgtatttatcagtctggttccgataagggactaccgtatggaatttggtatcagtaccatgcgtatggtatggattctgttgacgctgggaaccgccatactttttattgtggcgatgaattatgtgcttatttccatctcagccatgaaccgtcgtgccaaagctataggcgtacataaatgtagtggggcaaatacgggaactattttcggtatgttcttatgggagaccggagtcatcatgcttttttccttgctgcttgtagcgctgcttctatttaatttccgtgagccgttggaggacatgctcgacgttagtcttgccggtcttttctcttgggaaaacatttgggcaccgctttcagtgatagtcattttgtttatgataggcggcatgttgcccgggcagctttttgcccgcattccggtgacgcaggttttccgccggtacaccgaaggcaagaaaggctggaaacgtccgctcttgtttgtgcagtttgccggtacctcctttattttcggcttgttggggctggtgcttatgcagagccattacatcaccaataaagaacgtggattcgattaccaccgggtggcttatgcttcgggcgtatcctttgactcggatgcggaaagcgatgccaatcgtagtgtgatgctttctttgccttatgtggaagatggagcttgtagcagtaatcttcttacagacggattgagcggagaaggggttacgactgataacgggcagtggatgagcatgcgttgggtggaatttggcaaggactatgccccgtttatgaagttggaatttgcggaaggcaagaatatggatgctcctgggcagatattggtcaatgaaacatttttgaaaatgatgcattgggaagataaaccgataggcaggcaagtgcgcaacggcgatcgcatagcgggcaatattgtaggtgtactgaaagactttgccacatccaatgccgcttatgtggcggtgcaacctatgtatgcaacttatcttgaccgattttccggaaacatccaattacgtctgaaagagccttttgacgataacctcaagcgtttgaatgaagacatggaaaagctgtttcccacccgtgacattgtattttcctcgttccaaaaggtcattgacgaccagaacagtaccgtcacggatttccgtaatgcagctttactggctgccataaccatcctttttgttacgttaatggggttgattggctacatcaatgacgagatacaacgccgcagcaaggaaattgccatccgtaaagtgaatggtgcggaagcgtcatccattctccggcttttctcgaaggatatattctggatatccttgccggccgtttttcttggagggctgggagcctggtatataggcggtgtctggatagagcagtttgtggagggagtggattttggtatctgcggattcttgcttattgcatgcattgtactattgctcatcatcggttgtgtagtattcaaggcatggcggattgccaatgagaatccggtagacagtatcaagagtgaataaagaataacttcaggaaattatgatgagtagtcacatttattatacattgcaaagtttattgcatagacaggggaccaatgccattaaaatcgtatcgttagcattgggactgttgatgtccgtattcctatttgcgcggattgcattcgagttgaattttgatagcttttatcatgatccggataacctttatattgtgaagacgggttggatgaagaatggtgtattggaaggaggagagagtttctacaccattattccgattcctggcattatagctaaagaattttcagataaggtgcaaggggctacggtcagttgttcactattcgatgacgattataagttgggtaaccgtccgttggaattgaagacagtgattgctgatacgctctatttttctgttctcggtttggatgtagtaaaaggaaatccgcaggatttagcgaatccagatgtagttttcctttcagaaacggcagtacggcaggtatttggtgatgaaaatcccataggtaagactgtgtcatacgatttctgggggcatgaagctactttgcttgttaaaggtatttttcgggatgttcctttgaatacttctttgtataagcgtcccgaagcagttgtgtctttctcgaatatagagaagtacacgcagtggggaatgggatggcagagtggtgggaattatgacggtttcgttcggttacgcagtccgcaagatgccgattggttgaacgaacggatatcagcggctgtcgcacggcacttgccatcggatagcgggctggaactgtcggtccatattgtacctatccgcagtgtgcatctgggtgaagcgcaagtccgcaaaatggtttggattatgtttttcttgggtgctgtgttacttttcaccacgacgttgaattatgtattgatttccatttcttcgttgacacaacgtgccaaagcgataggcgtacataaatgtagtggtgcatcaggtggcagtatcttctgtatgtttctggtggaaacggcgatagtaataagtgcggcattgttggtagtcggaatattggtttatgtcttccatgagcggatggaggagttggcggcagtccctcttgccgtattgttcgattggcagcatttatatgcgcctttggcggtagtggcggtcttgtttgtttttggaggatgcttacctgccatgctctttgcccgtattcccgtgacgcaagtattcaggcgttacacttccggccgcaggggatggaagcgggtattgctcttcgtacagtttatgggtgcagcattcattataggtatgatgctgatggtgttcttgcaataccgctatatggtagggcgcgaccgtggttggcgaccggaacgtgtagtgtctatcttccagagaaaagtgaatgcagatctgttacgtacacaacttcgtaacttgccctatgtagaggcggttgcctcggccgaacgctctataacgggctttggagccaatcgcccgatacttgacgctcaaggcaacgagatgttctatccgcgtaattcgtggttcgatagtgactacttgccttttatcggtttgaaattgaaagagggacataacctcacagggaaacaccaactgctggtcaacagcacgttctgtgagaaaatgcattggacggacagccccattggcaagcaggtgaatgattatggtacggtggtaggtttgttggatagttttgcatttgtcggctgtaccaacgacagtgaagccgttatgatagaatggtttgaaggtaccgcattttgtctggaagcccgtcttaaagaaccgtttgatgacaacctgcgccgactgaatgaggaaatgagccgtctatatccacaagatgaccttgtgttccgttctatggagcaaatgttgggcaattatgccgaatctgtacgtgtcttccgcgatgtcactttatgggcatctttcaccattctttttatcattttaatggggctggtgggatatgtggatgatgaaatacgtttacgttccaaagagattgccattcgtaaggtgaatggagcggaaacatccggtatattgcgattgctgtcgcgtgatgtgctttggattgccataccgtctgtagtgcttggaacacttggagcttatgaggtagggcaaatctggatcagtcagtttagtgatgtggtactactgcctatcgtcggatatatcagtatcggctttttgttgcttgcatttatcgtgggatgtgtagtgatgaaatcatggcatgttgccaacgaaaatccggtaaagagcatcaagagtgaataagatattttcccacttggatggcctgctcaaggtaaacacatcatgcgtttggggtgtatggatgatgtgttttccgggatccaccgttaatctttcgtaaatctactcttgacagataatcgggtattatatatccataaagctataacagccgttacaaaagcaaagaagtccgataccggcatacatatccagatgccgtccagcccaaagtaatgcgggaatatcagtagtcccggcaacagatacagtaattggcgtgtcagcgataagaagatactgattttcgctttcccgatgctttggaagaaattgccgatgacaatctgtgcgcctaccagcgggaatatggctacggcaatgcgcacgcctctggaagcaatatctatcaactcttcatcactggtaaagatggcagatatggcatgggggaacaattcgcagataaggaaacctgtactggtgatacatactccggcaatgatggtcagacgcagggtagccttcacacggtcgtgtttttgcgcaccgaagttatagcctacaatcggttgcattcccatcgtcaaccccaatacaatcattacatagagtaccagcagccggttgataatgccatatgccccgatggccatatcgcctccgtactgttggaggctgttgtttacgataatcacaatgacacatgccgtaacattcattaggaacggtgacataccgatggataatatactgctgatgatgcgttttttcatcttccagaacccccgttgcagacgtaccacacttgtcttttgcaggaaatggcttactacccacaccatgccgatgaactgcgagatgaccgttgccgttgcagctccccgtattccccagtcaaattggaagatgaaaatgggagcgaggattatgttacagactaccgttaccatagacgtaagcatcgctttcttgggatatcccgtggcacgcatgatattgttcaggccaatcatggtataagtgacgggggtacccagtaatatcacctgcatgaagtcgcgggcatatggcaacgtatcattgctggcaccgaagaagcgcagaatatcatccaggaatatgaatgagatgccgccgaatatgaatgcattgaccaggcagaacatcagtgtgtttcccaggacttcggtagctccgtccaggtctttctgtcccagccggatggatgaaatggtagagccgcctgccgataccatcgtacagaaagctacgaccagattcatcagagggaaggtgatggcaagtccggcaatgcccatgggacctacgccatggccaatgaaaatgctgtcgatgatgttgtacaacgaagtaatcgtcatgcctataatggccggaatggaatactgcacaagcagtttgccaatgcgctcggttcctaatatatgcgggttgttcatttgatatgagtcaattaaggagtgcaaagataagaaatatttgtttggttcgcagattattctcacctttgtgcactatagtgttttggtattaacagatttaggtaaaagaaagtttatggacacaacaaaagcaaccgccgtactttttgatttcgacggcgtggtggtagacacggagacacagtacagtcacttctggcatgaaatgggaaagcagtatttgggtatggatgatattgaaggtaaagtgaagggccagacgctggtctatatttatgacaccttttttccgggcatggtgaaggagcagactgaaattacagaacggttgaaccgctttgaacaggaaatgtcattcgactttattcccggagtgcttgacttcattgccgacctacaccggaatgaggtgaagactgccgtagtgaccagctccaacgaagcgaagatggcagctgtctatcgggttcatcccgaaataaagactcttttcgaccgtatccttacggccgagatgtttacggcttccaagcctgcaccggattgttttctgttgggtatggaggttttcggcacaactcccgacaccacatatgtattcgaggattccttcaacgggctgaaagccggcatggcttcaggagctaccgttatagggttggcaaccaccaattcccgtgaagacatagcctcgttgtgtcattatgtattggatgactttcagggtttcacttacgataaattaactcaattgtacaagtaatcagaaaaaggattacctttgcgccgaaaattaaattgagtaattgtaaattgccaaattgtaaatactatcatgggttatatttcagacgacactcgtaaagtgactacacatcgccttgttgaaatgaagcaaagaggcgaaaagatatcaatgttgacatcttatgactatactatggcgcagattgtagacggtgccggtgtagacgtgattctggtgggagattccgcttccaatgtaatggcaggcaatgtcaccacgcttcccatcacgctcgaccagatgatttatcatggcaaatccgtggttcgcggtgtgaagcgtgctatggtcatcgtcgacatgcctttcggctcttatcagggcaacgaactggagggattggcttccgctatccgtattatgaaagaaagccatgccgacgccctcaaactggagggaggcgaggaaatcatcggtacggtgaaacgtatccttagcgccggtattcctatcatgggacatctcggactgatgccccaatccatcaataagtatggaacatatactgtccgtgccaaggatgatgctgaagctgagaaactggtacgcgatgcgcatttgttggaagaagccggatgcttcggactggtattggagaagattcccgccgcattggctgcccgagtggccagtgagttgactatacccgttatcggcatcggtgccggtggcgatgtggacggccaggtgttggtggttcaggatatgctgggtatgaataacggtttccgtcctcgtttcttgcgtcgctatgctgacctgcatacagtgatgacggatgccatcagccgttatgtatctgatgtgaagaacttagatttcccgaatgagaaagaacagtactaacaaacttatgacactcaatttttggcggatgtgtacggcaaatctgttgctgtacatatccgtctatatgctttttcctttgctcccttttgtgatgggagagcagttgggtgtttccgtcggacaggcgggcagcatgtttctggtttttgcggtggccatgtttgctgtcggtccttttcatgcctatctggtcgatgaatataaaaggaagcacgtgctcctttactccacactcattatgctggcggctgttctgggatatgcctttgtggatggttatacgaaatttctgctgcttgccgctgtgcagggagtatgtttcgggctggcaaccacagcgggcattacggtggccatcgacataacgacttccacacgccgcagtgcaggaaacatggtatatgcatgggctgcatgcttgggcatgctggtgggtgttatgttgggcattggaatgtataagatgtatggtttccgtatggtgacctatctgtccgtagcggccggactggccagcatatttttcgcatcgagggtatatgtggctttccgtgctccgataggcgtgtcgctgtgcaatatggaccgtttcttattgccgcgtgcatgggtacctgccatcaatatgctgctgattgcttttgtaccgggagcattgctaccgctgatgtttgtgggcgattattggtcattggcggcattggctgtactggtgttcattacagtcccgttcatgaagatgtttgtcaaattgtcgcaccactgccagcgtggaacggcaaacaccacttgccatttgtttatggaggcagggctgctggtgggcatggctgtggcttgccacctgatggacaaagtacagatataccatgtggcatctgttgccgctatgcttaccgtatttttctttgtgctgctgacctatccttattataagaaaaagcgggtgaggtaagggataaatacaatcaatcctataatggccgccgttgcagcacataccagtactgctccggcggctatgtcttttacttgccctgccacgggatgctgttggggagacaccaggtcgaccagcttctcaatggcggtattgaacagctcagctgctatcaccactccgatgcaaagaataacaatcatccaatcgatccgggtaatctccaataagaatccggcaatcaccgtaaccaccgtggcaatcagatggaagctcaggttctgttcttttcctatgcagcaccggatacctttccaggcatatccgaaactgcgcaactgctttttaaagtcgtacttcatggattatagttgtcatttaattccttgaaacttgtttcactccctttaccgtccttagttttttgacaagtgcttccaaatgtcccgtgtcgcttaccatgatggtcagcgttccggaaaacagcccgtcatgcgagtcaataccgatgcttctcaaggtaatacccgtttctttggaaatgatggaagtgatgttggtcacgatgccgatgtcatcgtgtcccactacgcgcagggtgatggggtactgtgtaccttgtgactttccggcccagcgtgctttcacgatacggtagccgaaacgtgagtgcaaatcactggcattgggacaatcgcaacggtgtatcttgatacctcccgttacactgacaaagccgaatacatcatctccatagatgggattgcagcagcgtgccaacttgaaatctaatcctttcagattttggtcaatgaccagtacatcttctttagtacctatctcttccggtatgccttgttgaaggttatagccttcagcactgcggtagacaatatcgtcacgtgtgtcgttttcccgtttttgctgttcaagatatttgtctataatctcgttgacatccagcacttcatcggcaatagcctggtagaagtctgtcactaccttgaagccaaggcgcttgatgaggcgcatcatggttccttcatcatactctattttccggttcttgaacttgcgttccagggtttccttggcgaaggcgtgctggcgtgcagccatttccttcaacgcctggcgtattttggtacgcgccttagaggtggttacgatgttcagccagtcctgcttgggtgtctgcgtattcgatgtcattatctctacttggtcaccgctatgcagcatttgcttcaactgtacatttttgccgttcactttggcaccgatgcatttgcaacctagtttgctgtgaatatgaaaagcaaaatcgagcacggtggagcctttagcaagtttgaacaaatcgcctttcggggtaaatacaaatacctcgtcttcgtacaaatccagtttgaactggtccatcgtttccagtccgttgctgtccgagctctctaaggcttcgcgtacggaagtcagccattcgtcaagaccagattcacctttcactcctttgtatcgccaatgggcggccaggcctcgttcggcaatatcatccatgcgttcggtacgtatttgtacttccacccatttgccttcgggacccatcacggtgatgtgcagtgactcatatccgttgcttttaggtacggacagccagtcgcgtagccgtttcgggttaggctggtacatatctgttacgatggagtaggcctgccaacattccagtttctccttgtccaggcaagagtccagaatgatgcggatggcaaacaagtcatacacgccttcgaaggggcatttctgcttcttcattttttggtagatggagtggatggacttggtgcgtcctttaatgtggaactttagtccggcgtcttccagtttcttttgtaccggtgcaatgaaagaggcgatgtacttgtcgcgtgatgcctttgtctcgttcagcttgtccttgatatgatagtaaacctctttttcggtatatttcagcgagaggtcttccagttccgacttcaatttatacagacccagcttatgggcaaggggcgcatagagataggccgcttcgttggctacctgccggcgggcttcatcgttcttgcaatcttttatctgccgcatgatgtttacgcggtcggcaatcataatgagaatgacacgcatgtcctcggcgaaagtcagcaacaagttgcggaaattctcggactcgatggtagggcttttggaataaagttcgtttacacgtatcaatccccggatgatgcctgccacgtcctcgccataaatttgctctacttcttgggcggtgcaagtaccgcagcgcacggagtcgtgcagcatgagtcccagaatggaggcgcgcttcatgccaatttcttccgctacgatgacagccgtttgcatatctttgatgacgggattcaaaccgaatatatcacgctggatacggttgttctgtatagtgttgacaagatgtgttttcagctttttgcagtcccccttctggagggtttctccggaaagttgcaacagtttgcggtagagcgagaagagtaaatctttctctttagtagtgaaaaattcatcagtttccataatcgtccgtattttatgcttcaaaggtaagttttttcttcattttcttgacggcagttctgctttttttgtatttttgggcatgaattaataaaacaagatattatgataacaccgcaagacaaagagttgctcgaaaataaaggcatctccgaagaacaaatagccgaacagttggcttgttttgaaaagggttttccatacttgaaactgtctgccgctgcttctgtagagaaggggatattggctccggatacggatgaacagaagaaatacctggacgcttgggaggcatatacacagaccgataaggtggtagtgaagtttgtaccggcttcgggtgctgctagccgtatgttcaaaaacttgtttgagtttcttggagcagattatgatgccccccagacaggctttgaaaagactttctttgagaagatagagaagtttgccttctatgacgacctgaatatcgcttgccggagaactgccggaaaggatatatcggctctgcttgctgccggaaactacaaggcggttgttgcagccttgctcgaaggggccggactgaattatggtgcgctgcccaaaggactgctgaagttccataagtatgaagacggtagccgtacgccgttggaagaacatttggtagaaggggccttgtatgctgtcaataaaaatggtaaagtgaatgtacatttcacggtttcgcccgaacaccgtgccttattcaaggctttggtggacgaaaaggctgccgcttatgctaagaagtacggggtggattataacatcaccttttcggaacagaaaccgagtactgataccattgctgccgatatggaaaacaaaccgttccgtgacaatggtaaacttttgttccgtccgggcggtcatggtgcattaattgaaaacttgaacgaccttgatgcggatattatcttcataaagaatatcgacaatgtggtacccgacaaactgaagggtgacaccgtattatataaaaagctgattgccggtgtactggtagctttgcagcagaaggtatttgcctatttgcagttgcttgaaagcgggaaatatacacacgaacaaattcttgaaatcctgcaattcctgcagaagcaactctattgcaagaacccggagacgaagaatctggaagatgccgaactggtgatatacctgaaagaaaaactgaaccgtccgatgcgcgtctgcggtatggtgaagaacgtaggcgaaccaggtggaggtccgttcttggcatacaacagtgacggcactatctctctgcagattctggaaagttcgcagattgatatggacgatccggaaaagaaggaaatgtttgaaaagggtacccatttcaatccggtggatttggtttgcgctgtacgtgactataaaggacataagttcaatcttgtgaagtatgtggataaagccacggggttcatctcctataagtccaagaacggcaaggacctgaaggcgcttgaacttcccggtttgtggaacggcgccatgagtgattggaatactgtatttgtagaagtgcctctgactacattcaatccggtaaagacggtgaatgatttgttgagagaacagcaccaataaaggaatttactattagacgatttactatttactattggctgtgctgtaatcgggtagcggatggtgaatagtaaatcgtctgattgtatagtgttgaatagtaaattgaaaattgtcaaatagtaaataaatagataggatgaaaaagattttattgttgggttctggtgaactgggcaaggagtttgtaatttccgcccaacgcaaaggtcagtatattatcgcctgcgattcgtatgccggagcgcctgccatgcaagtggcagatgaatgtgaagtattcagcatgcttgatggagatgctttggaacgcgtggtacgcaaacaccagccggatatcattgttccggaaatcgaggctatccgtacggaacgtctgtacgatttcgagaaagaaggcattcaagtggtgcccagtgcacgcgctgtgaactttactatgaaccgtaaggctatacgcgaccttgcagctaaagagttgggactgaaaacagctaaatatttttatgccaaatctctggatgaactgaaaattgcagctgaaaagataggttttccatgcgtggtgaaaccgctgatgtcctcttccggcaaaggccagtctctcgtaaagagtgccgacgaattggagcatgcttgggaatatggctgtaatggtagccgtggagacataaaagaacttatcattgaggaattcatcaagttcgacagtgagataacattgctcaccgtaacgcagaagaatggcccgaccttgttctgcccgcctatcggccatgtgcagaagggtggggactatcgtgaaagcttccagcctgcccatattgaccctgcccatctaagggaggcgcaggatatggcagagaaagtgacccgtgccttgaccggtgccggattgtggggagtggaattctttctcagccatgagaacggtgtctatttctccgaactttctccacgtccgcacgatacgggtatggtaaccctggccggaacccagaatctgaatgagtttgaattgcactgtcgtgcggtgcttggtctgcctatccctggcatcaagcaggatcgtataggagccagtgctgtcatcctctctccgatagccagtcaggaacgtcccaattatcgtggcatggaagaggttacaaaagaagaggatacttatctgcgtatttttggcaagcctactacccgcgtaaaccgccgtatgggtgtagtgctgtgttatgcacctcttgacagtgaccttgacacgttgcgcgacaaagcgaagcgtattgctgatagggtagaggtatattaatgattggtgatgaatgattggtgatttgttgatgaatggataccatcgacaaatcaccaatcgtcagtattaatcattgaaaaagagtccgggatagatctctcctccaagttctgttacatcgaggctttgtaatagttttccatccggagcatagaacagttggaattcttcatcggaattgtattgttccacctcaattataatcactgtgggatgtttgggaaaggtgatgattcttacgtcccttaacttcatgccggccattgtactgctcatgaatgcttctgccacgggagccggcactttttccagtgactctacatccgtttcagtcatgacccactccgcttgtttattgaaccagacatcaacttcctgaccatctgcaataaattctgccacgtagcaaccggccatttgctcccattccacatccgttgcttgagggtagagcttttgaaaagctgtttgtatatttacaggaagacgtccttccgcaaaagcggacactgacagcaagacaagtagtcctgccagaataccgaatttgaactttttcataatcaaggttgttttgagttttctgtaagaacaaccttgttgtgtttttgtttccggaaatcagtatattggttgatgcatttttaaacatcagtgaaccggcctttgtatacaaaagctttttctccgaaatccacttccggcaatacggcatcttccttgaataatccgtaaacagatgaccccgaaccactcatggaggcatatacagctccttgccgatacatctcttccttgatttctccgatagtgggaaattgggggaatacgctttcttcaaagtcattgaccattcgtccgttccattcttcaacgggaagttgggcaatttctttcagagacatttccggatgatgcggttttatttttgcaaaggcatcccgtgtagagacgaaaatgtccggcttcaccaaccatatccgatatcctttcagtgagaggggaaggggagaaaaaatgtttccgataccttctgcgtaagtcggacggtttttgatgaagaaggcacaatcggcacccagcttggcggcatactcttccagagtgtcatccggcagtccgagttcaaacttattattcagaagcttcaacatgaaggctgcatcggccgaaccgccacccagtccggctcccgagggaatatgcttgaagagatggatgtctaccggaggaaggttgaaccggtcgtccagcaacttgtaggctttcactaccaggttgctctctgcttctccctcaatttccagacctgcctgatgcagacggaactttcggtttccttcgttcaagatatttatttccaaagcatcttctatgggaaccggatagaaaatggtttccagattatggtatccgtccggacgcttctctgtgatattcagtcccaggtttattttggcatttggaaaagtcagcatggcgttgaaaattaagaattaataatttaaaattaaaaggggaagctatgaagtgcagcttccgaagacaaagttagtgatttctgttcatagtagattgaaaacttagcaatgatttatttaccgcttataaataaattcgcttatctttgccatacgagcgaagataggctgcacctcaacataactttttcatgcaagcatgaaagttatgtattcggtttgcattatctttgcttcccctttctaaaagggaagttcatttaatttttaattttcaattattaattcttaaagtggcagaacaaagaagaacatcccgtactccgaaaggaaaggcaccacagcccgtaacagactacggacgtatccagccgcaagcgccggagctggaagaagcagtcttgggagccttgatgattgagaaggacgcttattcgctggtaagtgaaattcttcgtccggagtcattctatgagcatagacatcagctgatatattccgctattaccgatttggccgtgaatcagaagccggtcgatatcctcaccgtgaaggagcagctttcaaagcggggagaattggaggaagtgggcggcccgttctatattacccaacttagcagtaaggtggcatcttctgcacacatcgaatatcatgcacgtatcattgcgcagaaagctttggcacgtgaattgattacttttaccagtaatatccagagcaaggctttcgacgagacgctggacgtggacgatttgatgcaggaggccgaaggaaaactgttcgagatttcccagcagaacatgaagaaggattatacacaaattaatcctgtcattgccgaagcctatgatttgattcagaaagctgctgcccgtaccgatggtttgagtggcttggaaagtgggtataccaagctggacaagatgacttccggatggcagaagtccgacctcatcattattgcagcccgtcctgccatgggtaaaacggcgttcgtactttccatggcgaaaaacattgccgtgaatttccgcaatcccgtagcgctgttctcgcttgaaatgagtaacgtgcagctggtgaaccgtttgatatccaacgtgtgcgagattccgagtgagaaaatcaagagtggtcagttggcggactatgaatggcagcagttggattacaaactgcgtgacttgctggatgctccgctttatgtggacgatacgccttctttgtcggtattcgaactccgtacgaaggcacggcgtttggtacgtgagcacggagtaaagattatcatcatcgactaccttcagctgatgaatgcaagcggaatgtctttcggtagccgtcaggaagaagttagtaccatttcgcgctcattgaaaggtttggccaaggagctgaacattcctatcatcgctctgtcgcagttgaaccgtggtgtggagaaccgtgaaggcgaggaaggcaagcgtccccagttgagtgaccttcgtgaatccggtgccatcgagcaggatgccgatatggtttgcttcatccaccgtcctgaatattacaagatttatacttctgccgatggcagtgacttgcgcggtatggcggaaatcatcatagcaaagcaccgtaacggtgccgtgggggatgtgcgtctgaggtttatcggacagtacacccgtttccagaatcccgaggatgatatggttattccacctccgacggagggtggaggagctacatttggttcacgtatgaatgcgcctatcggaagtacggcaacaccgccacctccatcggctgctgattttccgccacagacggacaacccgtttggaggtgtggggtcggacgggccattgcctttctgatgtatttttatggctacaccctttgccttgaatgcctatactatcgtagagtgatggctacacctttaggtacaaagggcgtagccatttaaaatgctgtattcgagcctatttgcttattctaaaaccttcaatgtggacagtaagaacgtcaatcttacttttgctcccttttccgttttgattgtgcctcgggcatctgctgttctgtgtttattttatcagtggatagggtatcttgctttatttcttgttcctttctcagccgcttgagtttccatctgttccagaaaaggagctcactccatttgttgaaatcctttttgaagataataccaataccttgtgttgtcagatttgtccgggtgtagtagcggtcgttcgtttcgttgtacgctttcaggcggatgtctccggaacggttgacgagccattccgcttcaaagtctcccacaaaattggtatttgccatcggattatcacgataaccaaagttaccattgataagtagtcggttattcaataattgtcctgaaagcatagtctcgaactccatgtctgtccagcctctttcaccggtactgaaattggtgccgaagttccagttattgacatcgagaatgttcgataaagcgttattcaactgtccggaaagggtggatgaaacaacactggacatcatattcgaattctgggtggctcctaagttttccggggtatagaacttgccgatagccaacagatagagtatctgcatgttcatttgctcgtcggtaggaatatagttacggacaatggcctgcacttcatcgcgttcgttgggcagttcgatgtcgaattttacatcaggtgaggtcaattgtccggtaaggtccatcatacagttcacttttacatttgtctggctgatgtagccggaggttgcctcgttgggcattaggtcatttaaggatgctgagttgaccgtataacctgcttttatgtccagagtggcatccagtggcgagccgttgaatgtaatggaacttccatccctgataataaagtcctttcggataacctcttgcagactgaatttatagactccctggcttatccggtaactgccaaacatctttacatctcctttattgaagaactcagtacggatatttccagttccccgtccactgatatagtcgccagcgatagggtccatgataatcttcatggtagcgtcgggagtggcgtctatcaagagattcagccggatatcagtgtcgctctctctttcttcctcgatttccttttgggcaatttcgtagtcggaaaggcggatagagtcttgtacggcacggcgtggtgtcttgtccacaaatttgatgaactggttgctgactgctgtagatacgttatcttttatataggtaaaggtagtgttgcgattggtagtcattgcaacatcaatgttaacgccatcttgggcattaccggcaatagtggcatttcccgtaccgtagacggtgccgtagaagggatagtccggtgattctttggtattcatcaccagcatgtcgttgacattgaaattgaaacggtactccaggttcttaaaatgctgatagtgcagatagccgctcatacttccttgatgcccttgcgtgtcgaaaatgcggttgttgcggaaggtcaacccgccgggctcgatgtagatgctgtctttgacggagaaagtggtgttgagcacgtctaccttcatagaagcatcgccgaatacacgcccttccatggtgagagccttgaatttgccatagaaatgtacatggccggtagcacgtccgttgaattcgggcgtgatgctactcatataatgatgtataaacttcaagttggtaccgtccgcttcaatttggagatccaatgaactagtgggcttcaaaggatagatatagccatacacatggcttttggcaatatctttctcccggatatgggcatctagatagatgcccttcacgtcgtggtgccattctccgtgtatgttggcatcacccagcaagccttcgttcaatccgaggttgcggataaacaagtcggtgctcatgacagggttttccaatactccgctggcgaaagccggaccggtggcttctcctttgaaattgactccgaggtctgcaatgtcgaacacataaccgatgttgatttccttcaaatccagacgtactgtatcttcgggttgtggtgaaacgataccattgatacgcaagtgccggtctttatggctgaagtagaaatcattgacatacactttgccggagtcgagtactacttgggaaggatgtatatcccacagcgtatcgttcagtatcacgttggtgggctggacatcaatgacggtttttaaggggggaagtttcctcttgctttcattcgcttcgttctgttcacggatgaagtgggcgacggcggcgagtttcccgctgtaggttacagtgctactgttaccccaattcagcgtggtctgtatgttattgttccgggcttgcgcttctaaagctatattgacagcgccgtttgatttgcggttgctgaagcgtaggcgtgtatggaactggtcaccgggattctcgcaaaggaacattccggattcgatgaatttgtttccataacggagacggggaaaatagccttctacgcggagccgctgtgccttgtcattgaagtatcccttaatggtggaatgggtatatacttttaccggaatctgaaagacggtggagaacagttccgtattgtaaatgtgcatgtcaaaatggaaattgttctctgtctctatgggtttcttgtctggcagaatcaaggcggggatataacgttgcatgatattcagtacactggcaggcagggtacgataagagtagtcaccttctatgctaccttggagaaagttggattggatggtcagccgtttctggccttcgctttctcttatggcagatatcttcagattgtccaggaagtattgtgtttccggagctgcgaatagtaagctgtcaacgttgatttcaccgttcatctcgtcaatggaaccgccggtgaagtctgccttgactttgactgatatttccgtatcttcatagttgggtgtaagatgtagggcatgaggacgaaatttgtcgatgcttgcctgaaagttgaaagtcggtacccgactggcggtattgatggtaccgttcaaaataacagaaccattggtgtcatccaaggcgacttttcccgtgaagcctccctgcttgtattctccatctagggtgatattttcgtaattgtagtcgctgtaatcaatggaggcaaccagccctttcagcagtacggacgggtattggttttcgtaatggttgctgttgacatctagattgaaagttactttacccagtttcttgttgcccagcatcttgcccagctcaaactctttggttttcactgcaccggaataggcaaaataacctttatctttgttagaacttagttttacgtcagtttggatggttccgatgtcagtgcgtacttgtccgtaagttacgaggtctgtgaagtagcccgagacttctccacggaaggaaaccgttcctaagtgttgcaggacgggaggtactccattgtagttcttgctgaaattccggacaaagaaggcaattccttccgggtctgcgtacaaattggacaaattaccgaatacataagcattttccggatgggaaaggtcttgtagagatacgtctcccctcagataaaaatgatttccgacagagacggaaaggtgcgggcaattcagttgattgatggtgccgtccgtctgtacctctacttgcaatttttccttgaaagaaccaaaagccggaacaaaagccgataaatcctgcaaggcgatttgagagggcagcaaatggaatgagaaacggacatcttgggcaagattgtcaaacgcccccagactgtcataatccatgtgtatagtatccattgccaaagaggtgttggggaggtcgatagcgaaattttcgattttcatccgttggtcattgccgataacctttagacttagtttcttcaattcaaatccggaatgttcttcttcgatgctcagacgcttgatggcggcattgatagaatcattttgtaatgcttttagggagatgtttgcaataatgttacgtaaacggagatgctgtggattgaattttcccggagtctctttctcggacagcacatcatacgaaacctttccgcggcgtatcagtaaggaattgatacggagatccaggttgtttttcttttgaactgtatctttggatgcgaatgcgtcgagtacaaactgaaaattaggtttatccttgggagtctgcttgcttagattgatgttaaagccgaacaattgtatgttactaatggatattttgccgctgaatagggggagaatatcgaatttggcagaaagacgggtccctttcagcatttccttgccggattggtcgtccaggagcaggtcgtcgatgatgatgcggttcaacaatcctatgtttattcgcccgatggaaatcttgctgttcagtatggaagccagttcattggcaacaaatacagacatttgtcgctgaacagatggaatgttcagcaacaatatggtaccaatgtacaatcccaatacaataccgagtacccagcgtactgttttttttagctttctgataggcggttaatttttataatcagccaacaaaaatatgaaataatacgttatgaatcgtacttttatcactacttttgcagcgtttaaacgtaaataaacattatgagtacaataatcttgggaatagaatcttcttgtgatgacacttctgcagctgtcatcaaagatggttatctgctttcgaatgtggtggccagccaagctgtgcatgaagcatacggtggggtagtgcctgaactggcttcccgcgcgcaccaacaaaatatagttccggtagtgcatgaggcattgaaacgcgccggagtaaccaaagaggaattgagtgctgtggcctttacgcgtggaccgggattgatgggatcattgttggtgggggtatctttcgccaaagggttcgcccgttcattaggtattccaatgattgatgttaatcatttgaccggtcatgtgttagctcattttattaaagcagaaggtgaagataatgtgcagccgggatttcctttcctctgcttgctggtttccggtggaaactcacagattatcttggtgaaagcctataacgatatggaaattttggggcagactattgatgatgccgccggtgaagccattgacaaatgctcaaaggtgatgggattaggatatccgggtggtccaattattgacaagctggctcggcaaggtaatcctaaagccttctcgttcagcaaaccgcatattccagggttggattatagttttagcggacttaagacctcgttcctttactctctgcgcgactggatgaaggacgaccctgatttcatcgaacatcacaagacggatttggcggcatcgctggaagctaccgtcgtagatatcttgatggataagttgcgcaaagccgccaagcaatataaaataaaggaagtggctgttgccggaggtgtttctgccaataatggattgcgtaatgctttccgtgagcatgccgggaagtatggttggaaaatatttattccgaagttcagctacacaacggataacgctgccatgattgccattaccggatatttcaagtatatggataaagatttttgtccgatggaagcacctgcttattcacgggtaactttaagataatatatataataaggtatgaagctggaagaaaaggtaggagagctgctgaaagcaaagaaattgtccctttccaccgcagaaagttgtacgggtggaggaattgccgctctgataacttccgttcctggcagttcggaatactttaatggtagtatagtggcgtattccaatgaaataaagatgtctttgttgcatgtatctgccgaaacattggaaaaatatggagcagtaagtcgtgaaactgttacagaaatggtgaaaggtgcgatgaaaacgctgaaaacagattgtgcagtggctacttccggtattgcaggtcctggaggtgggacttcggaaaaaccggtgggtacggtgtggatagctgttgcctataaaaatgaaatcgttaccatgaagcaggagggagacgagggaagaaagggaaatgtggaaaaaacaattcaaaatgcccttttgttgctttatgagaagctgaaatgaggaaaaaatgctatcgtacagtgaattattttaagaaaaacttgtttggtaacgataaaagtgcttactttgcgctctgtttgaaataggcaaaaaagaaaactataaaattaagatagaaatgtcaaagatttgtcaaattaccggaaagaaggccatgattggcaacaatgtttcacactcaaagagaagaacgaagagaacctttgatttgaacttgtttaacaagaagttctactatgtagagcaagattgctggatcagccttagcatttgcgctaatggtttgcgcattattaataagaaaggactggacgctgctttgaaagatgcggtagctaaaggttattgtgattggaaaagcattaaagttattggctaaagtagaggagaatactgattatggcaaagaaagcaaaaggtaacagagtacaggtgattctggaatgcacagaacacaaggatagcggtatgccgggtacttctcgttatattacgacgaagaacagaaagaataccacagagagattggagttgaagaaatacaacccgattctgaagagagtgacagtacataaagaaattaaataataaatctataacttatggcaaagaaagcggtagcaaccttgcacgaaggaagcaaagaaggacgttcttatacaaaggttatcaaaatggtgaagtctcctaagactggtgcttacatctttgatgaacagatggtccgtaatgaagatgttcagaacttctttaagaaataagataaatacagtggctgtaaagcgctaatgacttataaagatccccttgtcggtatttccggtaaggggatttctttttaaaaagaggacgaagtttttaatattcgtcagttttgttatatctttgctgaaaatgcgaagataggctgcacctcagcataaaaaatgaacgggttcattttattctgcatccggtttgcactatctttgcagggaatgcgaaaacaggttgcataaaaataattagtgtatgggattttttagttttttctccaaggaaaaaaaagaaacattagataaaggattatctaagaccaaagaaagtgtatttggcaagattgcgcgtgccgtggcaggaaagtcaaaagttgatgatgaagtattggataacctggaagaggtgttgataacttcggatgtgggcgtggaaacgacactgaaaattattgaacgtatcgaaaagcgtgcagcagccgacaaatatatgaatgccactgagctgaatcatattttacgtgatgaaatcgcagcgttgcttacagagaataattcggaggatgtggatgactttgaagcaccgattgcgaagaaaccatacgtcattatggtagtgggcgtcaatggtgtagggaagactactacgattggcaaactggcttatcagttcaagaaagccggaaagtctgtttatctgggtgctgccgatactttccgtgctgctgctgtggagcagttggtgatatggggtgaacgggtaggtgtgcctgttgtgaagcagaaaatgggtgctgacccggcttctgtcgcttttgacacactgagttccgcaactgctaataatgccgatgtggtaattatagatacggcaggacgccttcataataaagtcggtttgatgaatgaactgacgaaaatcaagaatgtgatgaagaaggttgtccctgatgctccgaatgaggtgttgcttgtgttggatggctcaaccgggcagaatgcattcgagcaagccaagcagttcactctggcaacggaggttacggcaatggctgttacaaagttggacggaacagccaagggtggcgtagtcatcggcatttcagaccagtttaaaattccggttaaatatattggattgggtgaaggcatggaagatttgcaggtgttccgtaaaaaggaatttgttgattcactgttcggggagaatgcatgaaacggaagactatagatatcattactttaggatgttctaaaaacctggtggattcggaacatttgatgcgccagttggaggaagtgggattccatgtgacacatgatgcggaaaggccgaaagggcagattgccgtgatcaatacttgcggtttcattggtgacgccaaggaggaatccattaatatgattctggaatttgcacaggccaaggaggaaggaagcttggagaagctttatgtaatgggctgcctttcggaacgttatctgaaggaattggccgttgaaattccccaggtggataaattctatggtaaattcaattggagagagttattgcaggatttgggaaaggcctatcatgacgagttgcacatagagcgtacattgaccactccaaagcattatgcctatttgaagatatccgaaggatgtgaccgtaaatgttcttattgcgctatccctatcattacggggcggcatgtgtcgcgcccgatggaggagatacttgacgaggtgaagtatctggttgcacggggtgtaaaggaattccaggttatagcccaggagttgacctattacggagtagatttatataagaagcaaatgttgcccgagcttgttgagcggatttcggatattcccggagtggagtggatacgcttgcattatgcttatccggcacattttccgactgatttattccgtgtgatgcgtgagcgtgacaatgtatgcaaatatatggatattgccttgcagcatatcagcgacaatatgctgcaaaagatgcgccgtcatgtgacgaagggtgagacatataagttgatagagcaattccgtgaagaggttcccggtatccatctccgtactacactgatggtggggcatccgggagaaactgaagccgattttgaggagctgaaagagtttgtccgtaaagtgcgtttcgatagaatgggggcttttgcgtattcggaagaagaaggaacgtatgccgctgctgaatatgaggattctattccccaggaagtgaaacaagcccgcctggatgagttaatgtctattcagcaaggcatttcaggggagttgagtgcggagaaagtaggcaggcagatgaaagtaatcattgaccggctggaaggcgaatattatattggacgtacagaatttgattctcccgaagtggatccggaggttttgattgagcgtggagacaaagcgttgcatataggtaacttttaccacgtagagatagtaaattccgatgatttcgacctttttgggcgaataatttaaagatttttccttatcttcttgcttatgtgaagaagatttgctaatatagcaccgtagttcaatttaaaggcttacattttgaataacaaagagtttacttctgaattatcgcggaggttaggatacacattgaaagatacttctgagctggttgcttcattgctgtcggatatggcacggcagttggaggaggggaatattatctctatacaagggttcggtacattcgaagtgaaaaagaaggcagaacgtatatctgtgaatccgactacaaagcagcgtatgctggtacctcctaaattggtgttgacttataagccgagtacattattaaaggataagtttaagtaaccggcttttaaaaaaatctcccgtattatgaatgagaaactgaacatacaagacttgattgacacgctggctgaaaggcatggcatgagcaagaagaatgcggatagttttgtgaaagaattctttcagctgattgaggagtcattggagaaggataagtatgtgaagatacgaggtttggggactttcaaactgatagatgtcgggagtcgtgaaagcgttaatgtgaatacgggggaaaggtttgagatacaagggcatacaaaagtgtcgtttacaccggaaccggccttgaaagatattatcaatagaccattttcgcattttgaaactgtagttttgaatgacgctacggtacttgaggataccctgcaggaaaatgacagtgaagatgatgaagatactgaaatcaaaactctggaacaagaggtggaggagaaggttaccttagtggaagaagctacgatagaagaacctttggtggaaactgtaatagaagagccgttaattgagcccgaaccggcagttgaagaggagaaaccggaaaaaacggaacctgaagcaatgcctgaaaatatagttgctgttgagccggaaccgtctgagccagtgataaaagatatggcagattcttcgactatgaaatattttataggcatcgttgtttttgtagtgttgctgtgtggtggtgccgtagctttcatgtattatccggacttgcttgacgcacttactgcaaagcctcttgtagaagaagttgcagactcggatgtgagggaatctgttactgaaaaggtggaggttcctgccggtcaagacaatattgccttgacagacagtattgtttcaaaagatgttgtagctcctgctcggatagatactgtggcagaaactgttgctgcaacaactcctacgcttaaaaaaactccaaaggaaaatgtacaagtacagtctcccactcctaaaaaagagcaaaaaaagacagttgtaccgtttgaaccggattctgtggggtatacgattgtgggaacagaaaccacttataccatcaaggaaggggaaacgctgactagggtagcgcttcgtttttatggaacaaaagctctttggtcttatatcgtgaagcataatcccggtgtaatcaagaatccggataatgtgccttatggtactactatcaagataccaaaattggccaagaagcagtaaaaaattactgcttctttttttgttaaatactaaactctatgaaagtagtttaatctaaaggtttcgcatagttttttaataaaaattagttggtatggttaatttattcccgtacttttgggagcgaaaaaataattaccggttcaaaaccggataaatgaggaaattaaacattaaaaaaatagaatgatttatggctgaaacaattgacatccgcgaactgaatgagcggattgaaagacaaagtgctttcgttaccaatcttaccacaggtatggaccaggtcattgtaggacaaaagcatctggtagagtcgttgttaattggtttgttgtccgatggacacgtgttgttggaaggtgtgcccggtttggcaaagactttagctatcaagacgcttgcttcgttgattgatgcgcaatacagccgcattcagtttacgccagacttgttgcctgccgacgtaataggtacaatggtttacagccagaaggatgaaacgttccaagtaaaaaaaggtccggtcttcgcaaattttgttttggctgatgaaatcaaccgtgctcccgccaaagtacagagtgctttgctggaagccatgcaggaacgtcaagttactatcggcaatgaaactttcgggttgcccaaaccatttttggtgcttgccacgcagaatcctattgagcaggaaggtacttatccgctgcccgaagcgcaagtggaccgtttcatgctgaaagttgtaattgactatccgaagcaggaagaggagaaactgattattcgccagaatatcaatggagagaagttcaacgtgaagccaatcttgaaggctgacgagattatcgaagcccgcaaggtggttcgccaggtatatctggatgagaaaatcgaaaaatatattgtcgatattgtatttgctactcgttatccggaaaaatacgatttgaaagagctgaaagacatgattggtttcggcggttcgccccgtgcctccatcaacttggccctggctgcccgtagctacgcgttcatcaagcgtcgcggttatgtcattccggaggatgtgcgcgctgtggcacacgacgtacttcgccaccgtatcggcttgacttacgaggcggaagccagcaatatgacatctgatgaaatcgtcagcaagatactgaacaaggttgaagtgccctaacgcataatagaggttttcgtaaacttgaggtttacaatccaatacctgaggttagcgtcgtaaaccttagggttgagtaccgaaaacttcaccccttttcatagggaagtttctgttataaactaaattgcgcttgtgtgcttaaatgagattattaaaataaatcaatggaaacaacagaacttttgaagaaagtccgtcagattgagataaagacgcgcggactgtccaacaatatctttgccgggcagtatcactctgccttcaagggtagaggtatggcattctccgaagtgcgcgagtatcagtttggcgacgacatacgcgacattgactggaatgtgaccgcccgcttcaacaagccttacgtcaaggtgtttgaggaggagcgcgaattgacagtgatgttgttggtagatgtttccggtagtttggaattcggtacggtaaagcagatgaagaaggatatggtgacggaaattgccgccacactggcattctctgccattcagaataatgacaagattggtgtcatcttcttttcggaccggattgagaagtttattccgcccaagaagggacgtaagcatatactttacatcatccgcgaactgatagattttcatgcggaaagccggaggacgaacattcgtctgggcttggagtatctgacaaacgtaatgaaacgccgttgcacggcatttgtcttgtccgacttcatcgaccaggaaagtttcaagaacgccatgaccattgccaatcgtaagcatgacctggttgccgttcaggtgtacgaccgtcgtgtggaagaattgcctcccgtgggactgatgaagattagggatgccgagacgggacatgagcagtggattgacacctcctcgcgtgccgtgcgtcgtgcccatcatgactggtgggtgaacaagcaggcggaactgaatgaaacgtttaccaagagtaatgtcgacaatgtgtcggtacgtaccgaccaggattatgtcaaggcattgatgaatttgtttgcgaaacgaaattaatcggaaaatgaaaagatatttatttctgatagcgttattaatagcatggtcgggaagggtagtagcccagtcggtaacggtagatgctacgattgactctttgcagattcttattggagagcaggcaaagataaagcttcaagtatctctagatgccgataagcgtgccatattcccggtatataccgatacgctggtgaatggggttgaaattattgatgtggccaaaccggatacgcaattgctgaatgatggccggcgtgcattgataactcaagagtatacagttacctcttttgattcggctctttattatctgccgcctatggaagtgacggtggataatgagaagtatcgctccaaagcgttggcattgaaagtatattcggtgaatgtcccgttagatccggagaatccggaacagtttttcggtcccaaaacagtgatgcaagcgccttttgcttgggaagactggtatggtcttatggcttgtggtgcgctgattatcccgatagggatattgcttgtctatctgataatgcgtttcttcgacaataagcctattatccgtaaggtgaaggtagaacctaagttgcctccccatcagttggctatgcaggagatagaacgtatcaagaatgagaaggtatggcagaaaggggagccgaaggaatattatacggaattgactgatgctcttcgtacatatataaaagaccgttttggtttcaatgctttggaaatgacttctacggaaatcatagataagttgctggaaatgaaagataaggaagctctatcagatttgcgtgaattgttccagactgctgatttggtgaaatttgccaagcataatccattggtgaacgaaaatgacgctaacctgattaatgccattgactttattaatgaaaccaaggagaaagaagaggagaatgctaaaccgcagcctacggagattaccattatcgagaaacgttctttgcgtaccaagattttgctgggagcgggtattgtagtgttggctgtagcccttgtcagttccttgatatatattggattggagttgtataattattttgcttaatactgaaaaagtgacttcaatcggatatacatgagtgaaaaatgagggatgtttggagcgaagctgaattgtaaatcgttaaatcgtacataaatatggtttttgccaatattgaatatttatttttgctgctgttgcttataccttatatagtatggtatattatgaagcggaagaatagtgaagctacgcttcagatttcggatgcccgtgtgtatgcccatacccctaaaagctataagaactacttgctgcatgtaccgtttgtattgcggataattgccttgatactgattattcttgttttggcacgtccgcaaaccaccgatagctggcagaacagtgagattgagggtattgatatcatgcttgccatggacgtttctaccagtatgctggccgaagacctgaaacctaaccggttggaagcggcgaaggatgtagcggcagagtttattaacggacgtccgaatgataatataggtataactttgtttgctggagaaagctttacgcaatgtccattgacagtagaccatgccgtattgttgaacttgcttaaagatatgaagtgcgggctgattgaagacggaacggcaatcggtatggggattgccaatgccgttacccgtttgaaggatagcaaggcaaagtcgaaagtcattattctgctgacggacggtgtcaataataaaggtgatatttctcctttgacagctgctgaaatagccaagagctttggcattcgcgtttatactattggggtaggaaccaatggtatggctccttatccttatccggtaggtggaacagtgcaatatgtcaatatgcccgtcgaaattgatgaaaagactttgacacagattgctggaacaacggaaggtaactatttccgtgccaccagcaactcgaagttgaaggaagtgtatgaggagatagacaagctggagaaaacaaaattgaatgtaaaagaatacagcaagcgccaggaagagtaccgctggtttgcgttggctgctttcttgtgcgtattactggaggtactgttacgcaactctatattgaagaagataccgtaaaaaggagaatgtcttttagtgtatcagtcattgcgtagccaaattgtaaattgtaaattgctaaattgtaaataaaaagatgtttcgatttgaagaacctgcatatttgtacttgttgctgttgctgcctttattggcggccttctacttgtactccaattatcggaggaggaaagccattcgtaagtttggtgaccctatactgatggcacagctaatgccggatgtttccaaataccgtccggatgtgaagttttggttggtttttgcggctatcgggttgttcacggtactgttggcacgtccgcagtttggttccaaactggagacggtaaaacgtcagggagtggaagtgatgattgcgttggatatatccaattccatgctggcacaagacgtacagccaagccgcttgcagaaggcaaaacggctggtggcacagttggtagataagatgcagaatgacaaggtcggtatgattgtttttgcgggtgacgcatttacccagttgcctattacgagtgattatatttccgccaagatgtttttggagtccatcgacccttcgctgatttccaagcagggtacggcaattggagctgcaataaatctggctgcccggagttttacacctcaagaaggggtgggacgtactgttattgtcatcaccgacggtgaaaaccatgaaggtggtgccgtagaagctgctaaggttgctgcagagaaaggtatccaggtcaatgtattaggggtaggtatgcccgagggtgcccccattccaatagagggtactaatgattatcgtcgtgaccgtgaaggtaatgtaatcgttactcgcttgaatgagcagatgtgtcaggaaattgctcaggcgggaaatggtatttatgtgcgcgtagacaataccaatggtgcacagaaagcgattagtcaggaaatcaataagatggcaaaggcagatgtggaaacacaggtgtacacggaattcaatgaacagtttcaggcagtggcatggattattctgctgttgttactggctgagatgttgatattggagcgcaagaatcctctgttccgcaacattcatttattctctaataagaaatgatgcgtatgttacagaaaaaatatattggaatagttttgctgctgttagtggcagcttcagcttctgcacagaaggcggaacgcgattatatccgtaagggaaaccgtttttttaaggatagcgtatatgtggatgcagaagtgaactatcggaaggctttggaggtaaacccgaagtcaacggtttccatgttcaacttgggaaatacattgacccagcagaacaagctgcaggaagcgatggagcaatatgtgggagctaccaagatagaaaaggacaaatcgaacttggcacagatttatcataatatgggagtcatctttcattctcagaaggattatgcaaaggcggtagaagcctataaggagtcgttacgcaataatccgaaagatgatgaaacgcgctataaccttgctttggcacagaaacagttgcaagaccagcagcagaaccaggatcagaatcaagatcaggataaacaggaccaacagaaggagcaggataaacagcaggatcagcagaaagaccagcaacagaatcaagaccagcaacaacaacaaccttctcagccggaaaagaaagataatgagatgtctaaggaaaatgccgaacagctgttgaactctgtcatgcaagacgagaaggatgtgcaggataaagtgaaaaagcagcaggtacttcaaggaggtcgtctggaaaaagattggtaacaaacataataggaataatatatgagaaaaatagttttcttatggatagcactgattgcagccagtatgaatgcctttgccgatggcaaggtatcgtttactgcgtctgctcctgacgctgtggcggtaggagaccagttcagactgtcgtatacggtgactacacaaaaggtaagggattttcgtgctccttctatgaagggatttgatgtgttgatggggcccagccgctcgcaacagagtagcgtgcagatgattaatgggcagacgacttcaaccagcagtattacattcacttatattttaatggcgactgcagaaggtgattttaccattccaggagccactatcactgctgatggtaaccaaatggtttctaattctgtacgagtaagggttcttccggcagatcaggctaccaatggagcatcctcaggaaatggtggcggacagagcagtggcactgccagccgcgcttcttccgggacatctgtatcgaatagtgatttgtttattacagctactgccagtaagacgacggtgtatgaacaagaagcattcctattgacatataagatatataccttggtggacttgcgtatgtttgacaatgtgaagttgcccgacttcaaaggattccattctcaggaagtggaacttcctaatgacagaagatggggattggagcattataaaggtagaaattatcagtctacaatctatcgtcagtttgtgttgttcccacaacaagccggtaagttgacgattgatgctgcacgctttgacgcttccattgcaaaggctacacaagttgctgatccgttcgaggcatttttcaatggaggaagcaattacgtagaagttaaaaagacaattttgactccgcaattgacgattgacgtaaaacccttgccagtaggtaagccagctgatttttctggaggagtgggagagttcaatataacttcttctatcaatagtacaaatgtcaagaccaatgatgccgttactgtcaaacttgtcatctctggtaccggcaatctgaagttgctttctaatccggaagtcaaattccccgaggattttgaggtatatgatccgaaggtggacaataaattccgtctgacaaattcgggcctctccggtagtaaggtcattgagtatctggcaattccccgtaatgcgggaacttataagattcctgccgtaaagttcagttattttgatattaattcccgttcgtataaaacgctgactacggaagagtatgaattgcatgtggaaaagggagcaggtaatgcagctcagaccattgcaaactttacaagcaaggaagacttgaaagtattaaacgaggatattcgttttatcaagcagaataatgtcactttgtctcccaaaggtgatttcttcttcggttcgttgacgtattggttgctttatttgataccgggtattgcattcattacattctttatcatctatcgtaagcaaatagcagccaatgcaaatgtagcaaagatgcgtactaagaaagccaataaagtggcggtgaaacgtatgaaacaagctggtaaattattggccgagaataagaaagacgcattttatgatgaggttttgaaggctctttgggggtatatcagtgataaactgaacattccggtatcccgtttgtctaaggataatatcgaagaggaacttcgtaattatggtgtgaatgatgcgttgataaaggaattcctcgatgcattgaacaactgtgagtttgcccgctttgctccgggtgatgataaccaggctatggataaggtatattcagcttctttggaagttatcagcaaaatggaaaactcgataaaacattaatcaggaggaaatggtaatgaatagaatattgttttttactcttagtctagtgatggcaattactgcctatgggcagaatcctgcatctgtagatacattacagactggtagtgactctacatccgtcggttcacatgcggaattctctgctgcaagacaagaaagcaatgtgacaaaggctgaaggtgacagcgcctatatacggaatgattatgcttctgccattcaaatatatgagaatctgttaaagaagggagaggctgcagaggtctattataatcttggcaacagttattataaggcagatgatatagcaaaagctatattgaattatgagcgtgccttgttgttggaacctggtaatgctgatattcgtgcaaatttggaaatagcacgttctaagacaatcgataaggtaatcccagttcctgaggttttctttgtatcttggactaaatcgttgattaattgtcttagcgtagatgcatgggctaagttggggattgtgttctttgtactattactcgtttcattctatctctttttcttttcaaaacagattatggggaagaaagtgggatttattgcaggaatagtattcctggctcttgttatattgagtaatgtgtttgctgctcagcagaaaggcgaactgatggaacgtagtgaagctatagtgttagcacctagtgtcacagtgcgtagtactcccagtgaaagtggtacaagtctgttcattcttcatgagggacgtaaagttgaaataaaagacaactctatgcgtgaatggaaagaaattcgtttggaagacggtaaagtagggtgggttccagcttccgccatagaaggtatttaaattttccctatattctaaaaacagctcgtataagcccgataattctgctttatacgagctgtttctgtatgtttttaggagctttttcttcgtatttataattctgtatacttcattagtgtcccattaaaattgggacgaattaaaaattaaacaaacttggcccatttggtccgaatcgttctttgtcattttgaaatttagttttattaaagaggtctctcagataagtcttatcagtcaatgagatgctcagtatttgtaacacttcatatgtacttctgtccagttgcatatcgtgttgaatgattgccaccaaacagtaagcgcatatagcagcatatatctgtattcgaacagcattctctgtagttccccaaaatcttttgattttaaggtgctgcttgagccatttgaaaaacagctctacctgccagcgatttttataaagttcagcaacttgaagcgcagatatatgcatcgcattggttatgaatataaattctcgttcttgttcttcatcccaatatttaaccagcctaagtggctctgggtaatattgtttaggatagaatcctgtcagaagtacactcgcgtctgaaagcacattcttaggcagcctacgtttccattggatggatttgtacccgagattcttttttgctctgacaacaaagtaggcttcaatttgatgaattttatacagcattttgaagttgctataaccgcggtcaaagatgtaataagagcttggttcataaggaatttcaatcatgactttagaatcgtgtacggatgcttccgtgatatgaaagaatgcaggaatctgtgtttccacatcatataatgtatgcactttagtaccacctttctttttgcggaattttgcccaccaaaagactgaaaggcacaggtcaatagttgtcgaatcgaaagcataaacgttaccgccaagtttgaaaatatgattagcacacttttgtcgtgcttcgctaactaggtagtaagcatattcttcaaagatgtgatagtctctatcttgatttgctcttgccagcgatgactttgatacatttttacccattcctaaatgataacatttggaatgatgagcttcaagagcaactatcaaatctcgcagactttcacgattagaaagttggccaaatatcaaagcaagtagttgattccagcaggtgaagtgcttcacatatttatcgccatcatacttggtgactatgcggttaaacttacttcgattcagaaatgaagccaattgagcgaaaacgtatttgtcttggaacatatgccatcggattaatctgatgcaaagctacaaattcaagtccgttcgctcggagaatagctgtaactaactaaatttcaaatatttcaaagaactcttttagattttaatgggacagtaatgtgtatacttaaaaaatgattattttttggagaggcaatattctttttgaaaaaagataaagaaatagtttgttttatccttttttttccttaagtttatagcgtgataataaaaaatacagagtattaaccattaaatttatgaatatgagaacaataacatttaatgaattacgtaagattaaagactcattgcctagtggtagtatgcatagaatagccgatgaacttggactgaatgttgacactgtaagaaattttttcggtggacacaattttaaggaggggaaaagtgttgggattcacttggaacctggaccagatggtggattggttatgattgatgatactactgttttagagcgagctttaaaaattttagatgaaatggcaggtaagactgaagaagctgttcgagcttaagaagagaaagttagaagaatcccaattgctgacaacaattgggatttcttatttgttttaatctcaaaatcaatgatatatggaagataaattagttactttggcaatcttaacgtacgcgaaagctcaaatattgaagaatgttcttgaaaatgaaggtattgagacttatatccacaatgtaaaccagatacaaccagttgtttcttctggtgtacgtgtgcgtattaaggagagtgacttaccccatgctctgaaaattactgaaagttctgcatggttatctgaagaggtagtgggggggaagtcacctaaactggagaagattagtaataaagtgctaattccagtggatttttccaattattctttgaaggcttgcgagttcggtttcaatttcgctcagaatataggtgcagaagttgttttgctacatgtttattttactcctatatatgcaacttctttgccatacggagatgtatttaactatcagctaagtgatgaggagaatgtaaggagtatcttacaaaaagttcatgctgatttgaatgaattatctgataaagtaaaagagaaggtagcttccggcgagtttccagatattaaatatacttgtgttttgcgtgaaggtattcctgaagaagaggtactccgctataccaaggaatatcggccacgcattatcataatgggaactcgtggtagaaatcagaaggatattgatttgattggcagtgtaacagctgaagtgattgaacgtagccgtgtaccggtattggccattcctgaaaatactccattcaagcaattttctgaggctaagcgtattgcatttattactaattttgatcaacgtgatttaatagcttttgattcgctaataaataatctgaaatcatttaagttttcagtgtctctgatacatctttctgatgttcagaatacatggaatgaaataaaactggctggtattaaggaatattttcaaaaacaatatccacaattggaaatacactatgatgtggtaaagaatgataatctgcttagtagtttagacagttatatcaagagtaatcatattgatattatgacattaacttcttataaaagaaatatattttcgcgcttatttaatcctggtattgccagaaagatgattttccattctgatacaccattgttggttatttacggaagaccgaatacgtaggtgttgaattggatatatatggtttgatcaatatcaggattatgtttaatataatgccgggataatttaatctaattttagttcttcttctctctcacttaagaaataatattctttactttctttcagaataataaaagcctaattaaattattaattaggcttttattattctgaaagaaagtattacatcaacttttcaatttcttcgaattcagggcccatctgcaaattataatacactctatatagaccatttaaccataaatctttttgatcaggtttcagttctcttgccttttcataataaggttttgccttttcatagaaagtcttcagagtagcttggtcttctttatacttaggatcattaatatctgtagttgctttttctgagaaatcttgtgcttgtaagcagtaaattaaacctaaattagagtatgcttctgcataattaggatctacttctatagttttcttatagaattcaatagctttatcatagtccttcatattgtgataaaggtagccttttacatacaaatagaatgtattgttaggatctttagccaacatatcatcagcaaactgcatagcctcgtcatatttgttgttattgctataataatcaatcaaatgaccgaagaagaatgaatgttcaggatatttctggataccttctttcaaagaagcaatccatttaacagtatcaccttcggctttcaatgcagtagagataaattccatagcgtatttcccaacttctttatcgtcttgcgcataaggagcatacttcaaaatactaggataatcttccatcttagcagctgctaaacttgcataatatgctatttgaggtaatacagtatctgtttgtaacagattttccttttcaaacatcgggttgatagcaatatcaatgtaggttgcaaagaaatccaacgcttttttattgccttccttggctgcatcgccttctttttgtgaggccaaattaaagaattggatgccgccattgatcagattgccgcgttctgctaaaattgtagcagaattagattttctatatttattcttgattttgcccttttcattgggaatttgtgctaattcgtcacatttgaagtagaatttacacatgtttaatgcactattatatacctgaagagtgtcataaggttttctcagataggcattttccatttctttctcacttctttttctttggataagacctgctacatcccacgtttcggcattgtcctttgtttcgggattagttaaagcttgatttatcagttcctctgctttggcaaagtcaggatttactccgttagcaatacttttagcctcttttacgttcttttcttgggcgaaagtaaaacttgcggcaagtagtaaaaccattgaaaataatactcttttcatgattgtagaaaatttaaattaatattatgtctattcttcattttcactgtttacctcgttctgagggctttcaagggtattttcttccccctcctctataagttcctcttcattttctgaagtgactttgcatacagagccaatttcgtcattacgtttctcaaggttgattaggcgtacaccttgtgtagcacgtcccatgatacgaacatcggcaactttcagacggatggtaataccggatttattaataatcatcaagtcattttcatctgtaacagacttgatcgttactaatttacccgttttatcggtgatattcattgttttcacacctttacctccacgattggttttgcgataatcttcaatatccgaacgtttgccatatccttgttccgatacaaccataattgtttccgcctcaggatctttgatgcatatcatacctactacttcgtcttgaccgtcctcatccaatgtcatgccacgtacaccggtggcagtacgtcccataacacgcacagcactttcatggaaacgaatggcacgtccgttacggttggcaatgatgatttcattgtcgccgtttgtcatacgcacttcgattacacggtcgtcttcacggatagtgatagcatttacaccattttggcgagggcgtgaatactgctcaagcaatgttttcttaatgacaccatttttggtacagaacaatacataatggctgttgataaactcttggtcgttcaggttcttcacgcgcaaataggcgtttacagcatcgtcagagtcgatattcaacaaattctggatggcgcgacctttcgaattcttagtaccttcagggatttcgtataccttcagccagtaacatttacctttctgtgtaaagaacatcatggtattatgcatggttgcaggataaatatgctctacaaagtctgcatcgcgggtttcggtacctttggagcctaccccaccacggttttgcgcacggaattcgctcagcggtgtacgcttgatgtatcccatgtgtgagatggtgataatcatttcatcatctgcatagaagtcttccggattgaattcttctgatgagtagacgatttctgagcgacgttcgtcaccatacttctcttttacttcaatcagttcatctttaatgactttgcggcagagttcgtcattgacaaggatctcttccaaataagcaatctgcttctgaatttcctcatattcggcgtgcagttggtcttgcatcaggcctgtgagctggcgcaaacgcatttcaacaatagcacgtgactgaatttcactgagttggaatcgctccatcaaaccagatatcgcatcattcggtgttttagcagcacggataatcttaattacttcgtcgatattatcagatgcaatgattaatccttccagaatatgtgcacgttctttggccttgcgcaaatcgtactgagtacggcggatgactacgtcgtgtctgtgctcaacgaagtattttatcaaatcttttagattcaacagacgtggacggccatgtaccaatgcaacattgttcacaccaaaagatgtctgcagcattgtcatcttgtagagcttgttgagtacaacgctggcatttgcatcacgttttacatcaataacgatacgcataccttcacggtcggattcgtcattagcattggcaataccttcaattttcttttcgttggccaaatcggctatattcttaatcaattcagctttgttgacgccataaggaatttctgtcacaacgattttatcgtgcgtcgaaccagtctcaatttcggctctagcacgcattatgacacgtccgcgtcccgtgagataggcttcgcgaacaccgttcataccgtatatatagcctccggtcgggaagtcgggagctttaacatacgtcatcaactcttctatatcgatgtcattattttcgatgtatgcaatacaagcgtcaataacctcagatagattatgagtcggcatattggtagccatacctacagcaataccagatgcaccatttaccaaaagatttggaatacgggccggcatgacggtaggctcttgcagagagtcatcgaaattgttctgcatgtcaacagtctctttttcaaggtctgtcatcatgtcttcaccaatttttcgcaaacgacactcggtataacgcatggcagcagcgctgtcaccgtctactgaaccgtagttaccttgtccgtctaccaacatgtaacgcattgcccaaggctgagccatacgtacaagagctccgtaaacggacaagtcgccatgagggtgatatttacctaatacttcacctacaactctggctgattttttataaggtttgtcggaggtatttcccaatcccatcattccgaaaagaattcttcggtgaacgggtttaaaaccatctctaacatccggaagggcacgtgagacaatgaccgacatagagtagtcaatgtacgatgacttcatttcctcctcgatgttaatctttataattctgtcttgttcaagcatttaaaaagattattaattatacattttcgggttcgtgaaaaaccacgctaaagtactgcttttttacgatatacaaaagttttcctccataaactttgttgcctgcggcataaatatagaagtactccctcctttcctccccaagttgccattaatatataaggtataaaatggaaaaacagatttgaaatttgtggcacgggatttgtatactattaaatcagttaaatatgatacgttgaattaataaatgcgtatctttgtcgtggataacctttttaattgaggagaattataaaatatgaacaatcaattttcacaaagagtttcagacataattacttatagcaaggaagaagccaatcgattgagaaatcgttatattggtccggaacaccttctgctcggcatgttgcgtgatggcggaggaaaagctattgaaatattgttgaaacttgatatagatttaaaacgagtaaaaagtcgcctggagggtttcctgaaagatgccgaggacgatactctcttgccggacgctgaagtgcccttgtccccgatgacggctaagatattgaagatgtgtatgcttgaagcgcgtttgctgaaaagtgcaactgccgatacggaacatgtattgctggctatcttgaaagacggagacaatcttgctgcaactgttttggaagaacaccgggtggattatcaggctgtatttgaacagctttcgatgaaatcgaccaatccgaatgcgggaatgggattcgctgaggatgatgaagaggatgaagaagacatgagtatgtctcgctcctcccgtactggaggggctggttcggcttcggctgcacagactgcatctagaaagccgtccaatgatacccccgtgctggacaatttcggcgtagacatgacccgggctgccgaagaaggcaagctggacccggttgtgggtcgcgaacgcgagattgaacgtctggcgcaaatcttgagccgccgcaagaagaacaatccggtgcttatcggtgaaccaggagtcggaaaatctgccattgtagagggtttggcattgcgtattgtgcaaaagaaagtttcgcgcattttgtttgaaaagcgcgtggtgatgcttgatatggcctctgtggtggcgggaacaaaatatcgtggtcagtttgaggaacgtatccgctctattatcaacgagttgcagaaaaatccgaatgtcatccttttcatcgatgaaatccatacgattgtaggtgccggtgctgctgccggttccatggatgctgccaatatgctgaaaccggctttagcgcgtggtgaaatccagtgtattggagctaccactctcgatgaatacagaaagaatattgagaaagacggtgctttggaacgtcgtttccaaaaggtgattgtagagcctaccacagctgaagaaacgcttcagatattgaagaatatcaaggagaagtatgaagaccatcataacgtgagctacacggatgaagccttggaagcatgtgtcaagttgtcagcacgctatataaccgaccgcaacttcccggataaagctattgatgctttggacgaggcggggtcgcgtgtgcatttgacgaatattaatgttccgaaagaaattgaggagcaggaaaagctgattgaagaggcacgtggcttgaaggctgaagctgtaaaatcacagaattttgagctggctgctagctaccgtgaccgtgagaaggaactttctgtccgcttggaggagatgaaggtcgcgtgggaagcccgtttgaaggatgaccgccaaacggtaggcgaagaggaaatagccaatgttatttcgatgatgtccggtgtacccgtacagcgcatggcgcaggcagaaggacttaaactggccggaatgaaggaagaactacaggcgaaggtgatagctcaagatgctgcgatagagaaacttaccaaagcaatcttgcgtagccgtgtagggttgaaagacccgaaccatcccatcggaacctttatgttccttggccctactggtgtgggtaagacgcatttggcaaagcaattggcaaaatatatgtttggctctgccgatgccttgatacgtatcgatatgagcgagtatatggagaaatacaccgtatctcgtatgattggtgccgctccgggatatgtgggctatgaggaaggcggccagttgaccgaaaaggttcgtcgcaagccgtattccattgtcttgctggatgagattgagaaagctcatccggatgtgttcaacatcttgcttcaggtactggatgaaggtcgtttgactgacaattatggcagaaccattgatttcaagaatacggttatcattatgacctccaatatcggtacgcgacagttgaaggaatttggccgtggcgtaggttttacggcgcaaaaccgcacggatgacaatgaacattcgcgcagcgtgatacaaaaggctctgaacaagacctttgctcccgaattcttgaatcgtttggatgaaatcattactttcgaccagctctccttggaggccatcacaaagattgtggacattgagctgaaaggcttgtacgaacgggttgaagcaattggttacaagctggttgtggaggatgatgcaaagacattccttgcttcgaaagggtacgatgtacagtttggtgcgcgtccattgaagcgtgctattcagaaccacttggaggatggactttccgagctgatagtggcggcggagttacagccgggtgatacggtaaacgtatcagtagacaaagaaaaagacgagttgagcatcaagaaggcataagctgttctttataaaaaccgtcaaaatgtcagtccttatgggctggcattttttttgtgctatatctgccggaataattaaaaatataaatctaaaaaatataaatgtagtatgcaaaaaggtaatattggggtaactactgagaatatcttccccgtcattaaaaagttcttgtatagtgatcatgaaatttttctccgtgagttggtttctaatgcggttgatgctacacagaagctgagaacgctctcctctatcggtgagttcaagggtgaagttggcgatttaaccgtacatgtttcgctgggaaaagataccattacggtgtccgaccatggtataggtcttacggctgaagaaatagacaagtatattaaccagatagctttctctggcgccaatgacttccttgagaaatataaaaacgatgccaacgccatcatcggccatttcggattgggtttctattcggcttttatggttgccaagaaagtcgaaatcatcactaaatcctatcgggaaggcgcccaggctgtaaagtggacatgcgatggcagtccggagtttacgattgaagacactgataaggcagaacgtggtacggatatcgttctttacatagacgatgactgcaaggaattccttgaagaagcacgcatctcctctttgttgaagaagtattgcagtttcctccctattccggttgcattcggcaagaagaaagaatggaaagacggcaagcaggttgaaactgccgaggataatatcatcaatgattccaatccgttgtggacgctgaaacccagcgaattgaaagatgaagattataagaagttctaccgtgacctttatcctatgtccgacgaacctttattctggattcatctgaatgtggattatccgttccaccttaccggtattctgtacttccctaaagtgaagagcaacattgagttgaacaagaataagattcagctctactgcaaccaggtatatgtaacggattcggtggaaggtattgttcctgatttcttgaccctgctgcatggtgtgctcgattcaccggacattccattgaacgtttcccgttcttatctgcagagcgatgccaacgtgaagaagatttctacatatatcacgaagaaggtgtcagaccgtttgcagtctatcttcaaaaatgaccgtaaacagtttgaggaaaagtggaatgacttgaaaatcttcatcaactacggaatgcttacgcaggaagatttctatgatagagccaaggattttgcccttttcaccgatacagacagcaaatattatactttcgaagagtataagacgttgattaaagataaccagacggataaggatggaaatctgatttatctgtatgccaacaataaagatgaacaatacagctatatagaggccgctacgaataaaggatacaatgtgctgttgatggatggacagctggacattgcggtggtgagcatgttggaacagaagttcgaaaaggttcgcttcactcgtgtagacagcgatattattgataatctgattgtcaaggaagacaagaagaatgaagcgttggaagccggcaagcaggaagttctttcttccatcttcaagagccagttgcccaagatggataagacggagtttaacatcacggcgcaggctttgggcgaaaacgccactcctatcatgataactcagagcgagtacatgcgccgtatgaaggaaatggccaatattcaggctggaatgagcttctatggcgaaatgccggatatgtttaacctagtattgaattcagaccataagctggtgaaggaagtgctggcagatgaggacaaggaatgtgctgctgccgttgctccagttcaggcagagatggatgaagtgaacaagcaacgtaatgagttgaaaaagaagcaggaaggaaagaaagatgaggatataccgactgccgaaaaagataaggtaagtgagctggataagaagtggaatgaactgaaaacgcagaaagaaggtgtctttgccgattatgcagccaagaataaggttgtccgtcagctgatagatttggcactgttgcagaatggtatgttgaaaggtgaagctttgaacaactttgtcaagagaagcattgacctgataaaataagtccctttaaatttgcatttaatatatgcaagggtattgtgattcttcagagtcgcaatacccttttttattcattttcaccaattataaagtgattttctccgttgaatacggcatttttagaaactattgtttatatttggggcaatgaacatttatcttactcggaatcgcatagttatgaaaagagttttattgtttttgtcgtttcttctatgtacctttattttacaagctcagaaagtggggcttgtattgagtggcggtggagcaaaaggcatgactcatattggcattatccgggctttggaagagaataatatacccattgattatataaccggaacctctatgggagctatcatcggttcgctgtatgctatggggtattctccggacgatatggaggcgctgttgcgctctcccgactttaagcgttggtattcgggtaaagtggagcccaaatacgagtattattttaaaaagaatcgtccttcaccggaatttttcaatatccgtttcgcttttagggactcgctgcatataaagccccagatacttcctacaagcatggtcaaccctatacagatgaatttggtatttgtggaattgtttgcacgcgctacagctgcatgtggcggtaatttcaacaatctgtttgtcccttttcgctgtatagcatccgatgtgtacaataaaaagccattggtattgggtaaaggggatttgggagatgcggtacgtgcttccatgagctttccatttgtctttaaaccgatagaaatagacagtacacttgcttatgatggcggtatttataataatttccctacggatgtgatgcgggaagattttcatccggatgtcattattggcagtgtggtggcggcaaatcccggtaagccgaaggagaatgacctgatgagccaattggagaatatgattatgcagaagaccgattattccattccggactcattgggtatagtcatgaccttcaagtacgatgatgtcaacctgctggattttgaccgtctgcaggaattgcacgatataggctacaaccgtactcttaatatgatggattccatcaaaagccgtgttcaccgtagggtgaatgctgataatgtgcgtttgaggcgccttgtcttccggagtaacctacctcaattccgtttccgggatattattattgaaggggcgaatgcccaacagcaagcctacatcaaaaaagaattccatgatgaggagcatgaagtctttacttatgaagacttgaagcgcgggtatttccgtttgctggcagataatatgatttcggaaatagttcctcacgcagtgtatgattcggaagccgatttatatcagctgcatttgaaggtgaagatggaggataatttttccgtgcgtctggggggcagtgtctctaccacgagctcaaaccaaatctatttgggagtaggatatcagaacttgaattattattccaaggaaataacttttgacggtcagttgggtaagatttataataatgcacagttgatgggtaagattgatttgcctacccgcatacctacatcctttcgttttattgcttcaatcagtaccttcgattactacaagaaggataagttgttttccaagaatgacaagccttcattcaattcaaaagatgagcgctttgtgaagttgatggttgccttgccgtttctggctaataagcgtgcggagttcagtctggggtatggccaactggaagataactattttcaatccagcgtaatagatttcgataaggaccgttcggacagaagtacatacaaacttttgggaggttccatcggtttctatgggagtaccctaaatacgcggcaatacgcgacaaaaggttatttggagaagttgatagcccaggtctttaccgggagggaaagatttgaacctgggaatccgcaagaagggtacagtccttctccgcaagaacggcaatcatggttgcaaatttcttatatgaaggaggcatatcacacaatgggaccgaagttcaccttgggatggatggcagaagcactgtattcgtcgaaaaatttttctgagaattatacggcaactatgatgcaggcaggagaatttgcaccgactccacatagtaaactgatgtacaatgaagcttttcgtgccaaccaatatgtggctgccggcatcaaaccgatatatgttttgaatgatatgttccagtttcggacagaattttatggctttacgccgatttttccgataaaaaagaatgcattgaataaagcgtattatggaaaagcattctcccgctttgagtatatgggagaagtttctgttatttgtcatttgcccttcggagccatctctgcttatgtaaatcattatagctcaccgagaagggagtggaatgtggggatgacaatcggctggcagttgtttaattatcgctttgtcgaataaatttcttcaaaaaaagtttgtatattgtttgctaattcggaaaaagtacgtatctttgcacccgttaaacaaagaggccgcgtagctcaactgaatagagtagctgactacggatcagccggttacaggtttgaatcctgtcgcggtcacaagttttcataattttttttaagggtcgcgtagctcaactgaatagagtagctgactacggatcagccggttacaggtttgaatcctgtcgcgatcacaaaggatctccgcaagaaaacttgcggagatcctttgtttttacagctatgggatatagttgatgttctccccttgtatggcactggcgcgtgttttgctaagtaaaacaaactgtttcccttaactaaacactttgtttcattatggagaacactttgtttcccttgacagaacactttgttccatcatataaaaacaaagtgtttttctctgctgaaacaaagtgttcagtattgtgaactaatagattagctgaaataatagtcttgtcttgattgagctagagacgtctttttctcgatttaaccagatgtctttttgctttataacgtaatcagtagactgttttgggattattgtactgataaatatagtcacataggaaaaaaagaaggagttaattccgtgtttccacaaaattaactccttgcatagctgatattaatatgttgtatactggaaattaatatcctataggggcggtataagaccttagcatttgatgttcaattcatccagaatcttgcgcatggcttcgaaggtggtgattctggtcggtaccaatggcaggcggagcttgttctcaatcattcccattgcgttcagcatggcttttactccggcagggttgccgtctacaaacagaagcttgaataattcggcaaatttgtggtgaatggtcaatgcattggcatagtccccttgcagtgccagacgtaccatacggctgaactcacgcgggaacgcgtttccaatgaccgagatgatgccgacggcccccaaagtaatcagagggaaggtgatgccgtcatcgcccgaaataacgtcgaaattggccggtttgtttttgatgatgtcgtccatctgcgtgatgtcgcccgaagcttctttgacggctatcacattcttgaaatcacgtgcaatgcgcagggttgtttccgccttcatgttcacgccggtacgaccggggacattataaagcacaatcggtaaatccgttgcttcagaaatggccttataatgctgatatataccttcttgcgatggcttgttgtaatatggaacgacggatagaatggcatctactccggtgaaatcgtcatttttcagtgtttccactatggcccgggtgttgtttccacctacgcccagcaggataggaattcttccgttcactcgctcgatgaccattttcttgattttctttttctcttcttcagtcagagtcggagtttctgctgtggtgccgagcacacataaaaagtcggtattgttttgaagttgatagtctaccaaacgcatcaacgcatcgtaatcaacgctttcatcctctttaaatggagtaatcagcgctacccccattcctttcaatcttgtctgtatcatgagtattataaagtaatctctaattaaatgactcgcaaaagtacgaattttttcgatttaccctacaaatataagccataaaaaagctttttgtggaaatttgttaggatagcaatgccaaaaactcatcttcgctcataatctttactcccagtttctgcgctttctccagtttggcaggtcccatattttctccggccaggataaagctggttttggaggagatacttccgacgttttttccaccgttcttttcaatcatctctttgtattcgtcccgtgagtggtgggtgaatacgccgctgatgacgatggactggcccgccagtttgtcggtgtatccgctgaggtcttcttctgtccggtggagttgcagaccgttcgatttcagccgttccaccagctctctgttggtaggattggagaagtaagttataatgctctgcgctattttttcaccgatttcatcgatgtttttcagcttttcgaggtctgcgttttccagctcttcgatgtccataaaggacttggctattttcttggcaaccgtttctcccacgaagcgtatgcccagtgcaaagagcactctttcgaatggcacttctttacttgccgcaataccgttgactatgttttctgccgatttttcgcccatccgttccaggttcttgatgtcgtcggttttgagccggtataaatctgcagtatcttttatcagtcccaatcggtagaacatatctacagtttcaggtcccagtccgtctatattcatggctttgcggctgatgaaatgctctatcttccctttaatctgcggagggcaagcggtttcattggggcaatagtgggctgcttctccttcaaaacgtatcagtttgctgccgcattcgggacaatgggtgatgaatttcactttttcaccgataagcatactgcgggcatccttatcgacaccggttattttggggatgatttcaccgcctttttccacatacaccatgtcgcctatatgcagatccaacccctcgataatatctgcattgtgcagggaggcacgtttcacaatggtgccggatagttgtacggggtccaggttggcgaccggagtcactgcaccggtgcgtcctacctggtaggtaaccttgttcaatcgtgttagtgcccgttctgcctggaatttatatgcgatggcccatcggggagacttggctgtgaatcctaaattcttctgctgcctcaagctgttgacttttagtacaataccatcagtagccaccggaaggttcttacgctccgtgttccaataattgatgtactcgaagacttcctccaggctgtgggcttttctggcgtgctctgatgttttaaatccccagctggcggcagcttgcaggttttcgtaatggccgtcgcagggcaattcttctcccaatagatagtagagataagcatccagctttctggatgctacgatggcggaattctgcaacttcaaggtaccggaagcagcgttgcgcggattggcgaaaagcggttcctcacgtgcttccttttcccggttcagttcttcgaaaaccacccagggcatcaggatttcccctctgatttcgaatgacttaggataattcccgtggaggaccagcggaatcgtccggattgtctttacattgtccgtcacatcatcgcccttttcgccgtcgccacgggtgacggcacgcaccagtttgccatcctcgtaagtcagcgagatggaagtaccgtcatacttcagctcgcagcagatttcaaactcctcgttcaacgctttttttacccgttcgtaaaagtcggtcacttcgttttcggaataggtgtttcccaatgaaagcatgggatatttgtgtgccacttgtgtgaagttcttatttaaatcacttcctacacgcatcgtgggcgaattatcatcttggtattcaggatgttctttctctaaatcttgtagctcgcgcatcaggtcgtcaaactccttgtcggatatttcaggagcattcagcacataataattgtagttgtgctggtgtaattccgcacggagctggtctattttttcttttacagtcatagggttttcggattgtttgaacgcaaaaatacgggtttctccccgaatatttgtacttttgcagcttgaaatagctaaaataaagttatatgcgcattgacattatcacagttttaccggagatgattgagggattcttcaactgctccatcatgaaacgtgctcaaaataaagggcttgcagagatacatatccataatcttcgtgattatacggaagataagtaccgtcgtgtagacgattatccgtttggtggctttgccggaatggtcatgaaaatagagccgatagagcggtgtatcaacgctttgaaggctgagcgggattacgacgaggttatctttaccacccccgatggtgagcagttcaatcagccgatggcaaatactctttcccttgcccagaatctcatcattctctgcgggcatttcaaagggatagattaccggattcgcgagcatctcatcaccaaggaaatcagtatcggtgactatgtgttgactggcggagaactggcggctgctgtcatggcagatgccatcgtccgtatcattccgggagtgatttccgatgagcagtctgcactttcagattcctttcaggacaatctgctggctgcaccggtctatacgcgtcccgctgattacaatggatggaaggttccggatattttactttctggacacgaggccaagattaaggaatgggagctgcaacagtcattagaaagaacccgtagactgcgcccagatttgttgggagagtaagtttactgatgtaaataaaaagaaaaaggacattcgtcaatgaatgtccttttttgtgaatatatattgcgaatggcaatctcttgttattctttatacctcaagtgcaccgataatgtcctttacagactgataaccgtgtctgtcgagatagtcatttattccttctaccactttcaccgtaaccgccggatcaatgaagtttgccgtaccaatctggatggcggaggcacctgcaagcatgaattccacagcatctttccagttcatgatacctcccaagcctatgacggggatttttaccgccttggccacttgccataccatacgtaaggcaatgggtttcacagctgcaccagacataccaccggttacagtggagagtatcggacgcctgcgttccgcgtctatagccattcctagcagggtattgataagggaaacgctgtctgcaccgccattttcggctgcgcgggctatttcggtgatgtcggtaacgttcggtgagagctttacgataagtgtctttttgtaaactgagcgcacggctttcaccacttcttctgctcctttggcggtaacaccgaatgccattcctccttgcttcacattggggcaagagatgttcaactctatggcaggaattttgtcaagttcattaatgattgcggctgtttcggcatagtcttcgatggcagaacccgaaacatttacaatcatgttggtctgaatgtccttgatgcggggatagatgtgttcaacaaagtaatgtacacccttattttgcagtcccacagcgtttaacattcccgaaggagtctctgccatgcgcggatatggattgccttcacgtttgtgaagggtagttccctttacaattataccacctattcgcgatagttcgatgaaatcggcgaattcttcaccatatccgaatgttccggacgcagtcatcaccggattattcatttgtaattcaccgatatttacatttaaatctgccataatagtttgtttatattaaaaaccggaccttctttacatacacacaaatggccttccgtggtattttccacacagcatagacaagcgcctatgccacacgccatcatattctccagagatacttcgcaactgatgcctttacttttggcatactttgctactgccatcatcatcggtttggggccgcaagtatatatctgctcaaagcacaccttatttaatatggagtgttgcgttacgtatcccttctctccgtggctgccatcttcggtggtggtatacacctcgccataggcggcaaactgttccaattgaagcaaatctttgtcacttctggcacccagcaggaaggttggcttgcagcctctcttggcgagctgttcgcctaaatataacataggagctgtacctacacctccacctaccaataagagcttgtctgagggcttttcaggcattgtgaagcagtttcccagcggaagcactacattgattatgtcgcctgcttttgcttcgcctaatcgcttggttccgtcacctacgagttggattaagaaccatacttcgttccgttgtctatctacataattgatggagatggggcggcgcaaaaaagtggcaggcgaaccgtccacacgaatctctgcaaattgtcccggaagcatttccggaagtggggacggagaagtcagcttcaacaacacatagttggcatgcaagcggaggttctctgtcactgtcagatctaaaatatactttttcatatctataaagagggatgtttttctttcgggtgcaaagatagtgtaaaccgagtgcagaataaaacgaacccgtttcttttttatgccggggcgttagtctatttccattctcattccttaattttccggtttgaaagtctcgtaggtattgtcatcaaagaaaattcttatttcagtgatttttctgggaggtctttctttgtagataatctcttgtcttacaatctctttaggtgcttttagagatgtttctaatgcaatttccttgcgattttcagtttcatccggccctttggtcaggttttccggattctcagcgaataaaggatagtcgaatccatcgttttcgggtgaatccggattattactcatattaccttttccggtaagcagccactccaagtttatatcattgtagcgttgatgtaatcggagaataacttccgtacttggatatttgttacgcggacccaagatgtgggaaatggtggcttgggccacgccaatactctcggcaaaagctcctgctgtcagtttctcccggtccataaccattttgaacctatcttttatactcatggtttatgtgttattacaattgtacatgctatttattggattacaaaagtaaaaaaatgacatcacaaaagcaaattaaaaatgtgatattttatgatttacaaatgaaatgttattattacaatattcatcattacaaatgctataatacaaatcatgggtaaaataggtgtttattttaagtttaataaaatggtatatttatctaattattagtgtattatattggtgatttctgataataaatactatattacatttgtttgtcgtttattttatataaaatataatctaataatttgattaatcattgtatataatttatatacatctatttattgcttgtaactacatgggttaacccctactctatcatttttgtaaactaatagtttacgatgttgaatgtcgcttattacatttgtttttttagatgtaatattacatgtgttataatacactcgtcatatagatatatatgtaatgtgttgaattcacaatagtcaattatcctagttgtgtattacaactattgtactcttgaaaagtgtagcagatttcttatatgacgtaaagctgaattgctccatctcttcttttttactaaaggagaaaaaatgtgacataaataagagaataagatgctttatttattttctagtcttcaagacttaaatccttgctttatttctgtataattggtcgattcgttataaaaacgcgattctcagagcttataaatggacgtaatttgctgtaaatatgagtattatcttctattttatagtctatgctaaggagtaaaatagaaaaaagggggataaatccccctaaaaatgacataatgatatcaaatcagtctgttttatgctttttcccttttatggaaaagtatactgtatggaagttaatgtagaatcttaaagaccaattcccggaggatatctccatcgcttagggaggaatttcctactcctttggatttggcatctgcatatcgaatctccccgattatctgcatggtctttactccgctgtaacgacgcatggcacttaggtattcgcgcgactgccagggagtctttaatcctatgaaactggcaataccctgctccgtcttttcgggcgcatagtaagccaacattaagttggagaagaagccgaaaagtaaagataaagtcatctggataggattcgttttcggattttcttcaaaatattttattattttattggcctttagtatgtctttttctacgatggcactgcgaagttcaaagttattataatctttgctgattccgatgttgcgttctatctgttcgggggtgacgcgtgtctgaccttttggaagagttataatcagtttttccagttctcccgtaaggcggctgaggtccgtacctacgaaatcggcaagcatggaggtagctttgggatccaaatctacacctttgcgcttcatgtatgaggtgatgaatgccggtaactgggcatcctttaccttcttggattcaaatagaacccccaccttctctatttcggccaccagcttttttcttctgtccagcaccccatgtttgtggcatagaacaagaatggtggagttcaacggcttttgcaggtagtatgaaagctcttccatgttgcggatggcctgcgcttcctttacgactacgacctggcgttcggacatcatcggatagcgcttggccgcattgatgacagtggctatatccacatctgcaccgtagactacggtcaggttaaattccttttcggtgtcagtgagaacattgtctacaatatagtcggagatgaggtctatgtaatacgattcctcgcccatgagatagtagacggggcggtattgtttggctctcaacttttttagaatatcatcacaggtcgtttcttgttttgccatataaagtaagtgttacgagggtatgtcccgtaaagaggattaccagtcgaacttcaagtgttttacggttttcttctcatcaataatcatgcgcagggatgcaattccgatttcaacatgctcatttacatagttctgggtaaccatgttgtcgctcttgtcggtttttacaccttccggaatcatcggttggtccgaaaccagcagaagggctcccgtaggaatatgattggcaaaaccacaactgaataaggttgccgtttccatatcgacagccatggcacgggttttcttcagatattccttgaacccctcgtcatgttcccaaatgcggcggttggtggtgtatacggtaccggtccagtagtcgcgggcatagtcgcggatggcggaagaaacggcgcgttgcagcataaatgccgggagtgacgggacttcgggcgggaagtagtcgttggaagtaccttcgccgcggatggcggctatggggaggatgaggtcccctattctatttttcttgtctatgccgccacacttgcctaggaacagacatgccttgggcttgatggcgctcagcaagtccatgataatggcggcattagggcttcccataccgaaattaatgatggtcattccttctgcgctggcagatgtcatattggcatctttaccgagaatgggaacattgaacttttctgcgaaaatctctacatacttgttgaagttggtcaacagaatgtactctccaaaatcctccaggttacgctttgtgtaacggggcagccaattggctacgatttcttcttttgttttcataagatttcattaaatttgtgttcccgaaagacgggaaccattatttaacttacaaatgtagtaaatgttatcgttaaacctaccagcattcgatgctaaaattgccgcaaggaacggaaaaaatgttattttcgatgtaatccgtcgtcgttatgttgctttgacgcccgaagaatgggtgcggcagcacttcgtccactttcttcttgctcacaaggggtatcctcaggcgcttatggcaaatgaagtgcaggtacagctgaatggtacaaagaaacgctgtgatacggtgctttatcggcgtgacctcaccgcccggatgattgtggaatacaaggcgcccgaaatagaaatcacccaaaaggttttcgaccagattacccgctacaacatggtgctgaaagtggattatctgattgtcagcaacgggcttcagcattattgttgccgcatagattacgagcataacagctatacttttctgcaggatatacctgagtatcaagatttataggaggagctaccgatagccttcttgcctttctcatctcatcgcatcatataccatgcgtgatatgcgggcgatgatgtctgcattgtcctcatccgtctcgtatgagtccatgatgaaggtggcaatgtagtatttccgaccgtcgggaagaataacgagcccggcatcattatctgcagttttcataccgtcggcattgcggtcggaagaaccggtcttgtgtcctaccacggtttgggctggcaacatacctttcaatttgttggcgccggtttcagtatctatcatggtctgccacaagaagtctttcagttccttgttggagaacaactctttttcatcggccgttctcagtagctgggccatagcggaaggagtactccagttgcggtatacagcctcgaagctggagtgcatgtcgtcttctgtttccgagaggttgaaggagtctatacccaaccggcggatatagtcattgatatgtttgatacctcctgcatattctatcaagatgtcgcaggcattgttgtcgctttgggaaatgctgtattgcatcagctccctaagcgtaatcgtgaaatcctggtcgggaaacttcttccgcagggggctgtaggtattgggcagcatttgggatgcctttatggaaacaatgctgtccaggctgatgctttgcttatccatcttgtccagtacggccagtgccacatggaatttgaatacactgagcaaggggaagtgtacatggtcgttataccggagcatgtctcctttgtctgtccatacggctataccaacggtggctttcttgccattgagaagactgtcaatccggttttcaagttcagacatttgctgcgtccggacgacggtagctatacaagtgaataaggtaagtatggcgatgaaatatgctttcataacttcaatttctttaagaggcaattcgcacgcaaagatacaacttttagcagcaagttgctaaaatgagttatggattatgggttataagtgtgatagcttataacccataatccataacttgtagctcatcctccctattgtttcttactgaacttctcctgcaacttctgcatcaattcgtaaaaattaggaatatagaccgtggcaagcaaggtattcagtgccataccaaacactacagcggctcccagtgcaacacggcttcccgcccctgctccggttgcaaaaagcaatggcataaccccgaatacaaatgcaagtgatgtcatcagaataggccgcagacggatatgccctgcctgaaatgccgcatcgcggattgaattgccttgtgcacgaaagtcacgtgcaaactccacaatcagaataccgtttttggcagacaaggcaaccagtaggatgataccgatttgtgtgtagatgctgaccggagttcccatgacatagcatcccagcatggcaccgagcagcgccaccggaagtcccattacggcagctaccggactggtccagctttcgtattgtgcggcaagcacaaggaaggcaaccaacagtgccatgacgaatacgacggttgtagtggttcccgcctgcgtctcctgataggccaccgaagtccattcatatccgaactcgtctccgagatgctccttgattagactttccatttgccggatgccctctcccgaactgctgcccggagccacattgcaggtcacggctgctgtggagtacatgttgtagcggtttatctggtccatgccaagctgttcttccactcgggtgaaggaggagaaaggtaccatttcgcccgatgcattgggaacgctcagtttcaggacatcgtcgatgacacgctgggcatggtcacctgctcccagcttcacttggtagatgtggccgaactgcacataatcattgacgtaggcctctcccatatagtagcccagggcagtgaatacgctgttcagcggaatgcccatcagttgcaccttgtcgcggtcgatattcaggaaatattgcgggacattggcttggtactggctgctgaccgatgccaatgccggataattgtggtagtgctccatcaaggtctctacggcacgttgcatctcggtggcaccgaggttgtggcggtcttccaattggagttgcaggcctccggtggctcccagcccggggatggcaggcggaaccatggcaaatatctctgcttcctggatgccatacacttccatattgaagcgttgcactacggcttcagccgtatgttcctttcccttgcgttcattccagttctgcagtacgatgaagtaggtggccgcattgctctgttcccctcctcccatcacggagaagccggatatgccgatgtagtcctttacttcggggtaagaatcgagaatcttatttatttgtttccctacggcttgggtacgctccagactcgatgcagggggaagttgtacgactgcgaggaaatagccgtcatcttcttccggaacaaacgtggacggccatttgacaaacagcaggacggcaatcagtgtgaacaccgcatacgaaacgatggaagcgccgggacgccggagcagatactccactatccggtcgtagactccttgtgtcttgtcgtacagacgattgaatcctcgatacaagggattcttggaaggccgggtaggttgcagcatcaaggcacagagcgccggagtaagggtcagtgagttgaatccgcttagtacggtgctggctgcaatggtcagggcgaactgtttgtacagttgccccgaaatgccactgacgagcgttgtcgggataaatacggcaagcagcaccagcactaccccgacaataggtccggtaatctctcccatcgcttcggtcacagcctggcgggaggtgtagcgccccgtgtccagcagacgcgtggagttctccaccaccacgatggcatcatccaccacgatggccacggcaagtatcagcccgaacagcgtcagcgtattgatggagaagccgaacaaggacatgacggccagtgtgccgatgagtgataccggaatagtgatacaaggaatgacgaccgcccgccagttctgcaggaacaggaagatgacgaggactaccagcagggtcgtttcaaggaacgtcaccatcacttcgtctatggaggcatgaatgacatccgtagtgtccagggttacattgtattgtatgcctgcagggaaattttgcgagagttcctgcatttttgcctttactcctttggaaacgtccagcgagttgctgccaggttgctgatagatagcgatggcagcggtgggtttcccgtccagttgggatactacgctgtaagaggccgagcctaggtcgatgtgcgccacgtcgcgcagacggagtatcttccctccggcttcggtacgcaggatgatgttgccgaactcttcgggcgaggtaaggcgcccttttacggtcaggctgtattgataggcatttttattgtctgtgccgatgggttgccctacgttacctgcgctgacctccacattctgtgattggatagcttggtatacatcggccggagaaagatagcggatgcgcatggcggcagggtcgagccagatacgcatggagtagtcccctgctcccatcacattgacggcgcctacaccgggcacgcgtgttaactggtctacgagattcagcttggcatagttgctgaggtaaagtccgtcgtagtctttgctgtccgacgtcatcgtgaggaacatcacgatgttcgatgactgtttctgcaccgtgacaccttgtaccacaacgggagtaggcagtgacgactgggctacgctgacccggttctggacttgtacggtagccatatcaatgtccgtgcctacggcaaaagtaatggtaagcgagtaagcgcccgatgagctggagttggaggacatataaagcattccgtccactccgttgacttgctgctcgatgggaatgccgacggtttgtgccaccgtctgcgcattggctccgggatatacggcactgacctgcacagtgggtggtgtgatgtccggatattgggcaatgggcaggatgcccagtgtgaccagtcctgctacgacgatgagcagcgccaatacggtagcaaagataggacggtctatgaagaattttgaaaacataggctttggtattaatcaattcatattagttgtcaatgggatgtactttcattccatcccttaccttcatcagtgctttggtgacgtagcgctcccggggagtgatgcctgcccttatctggcgcaggctgtcccctatcagttgtccggtttctatatggcggtagcgcactatattcgaatcgttgactacgtatatgtatttccccaactggtcggtaccgatggaggcgtccgacagcaggatggcctgctgttgctctccgtagggcaaggtgatgctgacgtagaggccgcttttcagaagtcctttaggattgtcgagacgggcgcggatgttcagagttccggtgttcaagtctacgttgggcgaaagataatccagttgtgcaggataagtgagaagcccgtctttgcccaggctgacggttacttgccggggaatgctgtccccttgctgcatcagcatggagagccattggttgtctgccacgttgaagtaggtgtacagatggtcgtccttgtagatggttgccagtgtgacgggctgcacgctgccgcctacatagcttccggcatccaccaggttacggcttacagtgccgtcgaagggggcacggacggtgcagtagctcagattggtgcgtgccgtgttcagggctgcttccgcattgctcactgcagcctgcgaggttgccacgttggattgtgcttgcagcacttgtatacggcttacggcatcgcttttcacggcctcctgcatacgtgtgtagttgttttgggcgtattccaggttggcgcgggcagtgttgagttctgcttctgcctgccgcacattgtcttgatagactgtcggttcgatgacaaaaagcacttgtccctggcgtacccggctgccgggagcgtaagagatggtctgtaaggttccgctgactctgcctaccaggtctacggtctttttagaagtcaggtagcccggatattcttttgtcagcgtgatgttctgcactgtcggacgggccacgcttatctcgggaatgggcatcgtttgtgccgtttctttccttcccccgcatcccgttgccagcaatggcaggatgagcagggtgatgtacatttgatttttcatatacggttcggtttagtttatattcttatttctgattcatttcatatccgcctcccaatgcctggtataaggctatcagatgcagcaaggagctgccttgtgcctgcaccagttgattttcgtatgtcaggagtgagcgtagtgcgtccagtacgttctggaagggagtaagcccttgtttgtacaaatcgagggagagctttagcgtttcttctccctggttgcatacttcgcgcatggcaacaatctgttggatggagttgcggtaggagttcatggcattatctgtttcctgcacggcggtaagcactgtctggttgaactggtgaatggattcatcgagctgggcacgtgccagacgggtggcgttcaccagtttggtaccgctgaataaggtccagctgatgcttggagcaatttcaaatgtcatactgttccgtttagtcaagtccttcaagtcatgggaggaatagccgatggaacctttcaggaacacttgcggcagccagtctctttgggatgcgccaagcattgccgcttgtgcgttgacttggcgttcggcttgccgtatatcggggcggcggagcagcaggtcggcaggaatgccgatgcctataggttccatgtagtcgggcagtttacccggtttttccagtatggggcggatatgttggggataagtaccgagtaagattgcgagtgtcgtgatgtattggttgatgcctgcctccagttgcgggatggaggctttggtactgtaatatacggatttggcttgtgaaacgtccagtttggacaccagtccggttttgtagcgtacttcggtgatgttaagtacggctgcctgggtatggcaattgtgggtcactacacttagttcttgctgcagttcgcggagtccgatgtaggcggaagctatctgggcacagagggataccatgacggaggtatattcctccttgcttgccatgaaggtttcccgctgtgcctttacccgttggcggatacttccgaatacgtccagctcccaactggcgttgagcgaggcgctgtatgcaccggtaatggattgcggaagtgcgttgacattgccgctgctttgctgccgtgcccatcctccgtccaatgagatggaaggaaaaaagccgccgcgttctatccgcaggttggctttggccatatccatacggtccatggcagaaagtacggaatagttttgagtggaggctaccgtaatcaatgaatccagcatcgggtcatcgaatgctttccaccacttgtcgtcaacgggtggtatctgtccgctgaacagattgtcatctccgggaatggcatgggagacgtcccttccccagccttgtgggagtggcttctcaagatagcggttggctttctgtgccatagccgcaggacataggcataatatgagcaacgcagtgctccaagcttttatattcataaataaaggtttaggtggttatctttttatgggattgataacaacctaaacctttatttgtttatgagtatcttatcaggtgtactgagtattatcagaaagcatacccgaatcctacattcaagtagatgggatacatggcaaaggtaatggtattgaaatctttcttaaaaatatcattcaatccccatgtaaggtcggcaaatacactcagatgtttgaaggcacgccagtctacaccagcttgcacgccccaggcaaacttgcgcaagtcatccgaaaagtcgtaagtggcaatggcaccgtcggagaagttcaccttttctccggtggagtctccttcacgcaaatagccttcatatacatgtccggagaattcctcatccatcagatatgagacatatatacctgctttggcccgcaatcgtgagttgattttatatgcacccagcacggggacggtgatgtaggcattgcgtactttagtttttactcccccagtccagttgccttttaaacggttaccgtcatttcctatgatttccatgccatagttctttactgtcgctttggtaatcatatttttggtttccagtcttacaccggttattacaccccatttttttgttgtgcccaaccatttaatggcatttccttccagcataaaggctaaagtaggattataggcatcaatacttcgtatttctacgggtaatggaagcggagaagtgccgccgatactgacaccggcccttatctcatattcccaaccgtgtagagcggcgtttataagcgtacggttctggttttcttgagcgtataaggcagtctgcatgcatcccaccagtacgataaatgctaatattttctttatcatgttgtattccaattctatatgattcttattcgtaaatcagttccacttcgtctataagtaaggtgcttcctggagcaccctcaaaagtggcaccgtccttgcttgaggcaaatatgatgcttatcttatattctcctttagtcagtctggcttcgtcaatcttctttccgtagcgttggtagtcgaaaggtatatcaaagaatttccattcgtctccttctgtttcttgcggattggaaactaaagcaagagccaccatgctggggtgttcgtagttttgattcggcagatttccatccagtgttacatctgtcccctttcctgcactgtcatattttactccatcataaaatattgcatagatattgaatatatcttttcgggaggtatattcgccattttcataaaattgttctccggccttgtacttatagtatccagtcagtcgtagaggtttattgtagaaaggagtaccgaagcgcgtagcactaagcggattggtaatagcattcagcatgtcaaaactgccgataaacagattaccggcggcgatgggcatacctaccatgttacctaagtcgccagtgaggcgtgtttccaatttcacacattttccagttttgccattgtctatttgggtagtaggataatcttctgttgcggctccactcatagcccatttgaatcccttattaccacttgcccatgtcaattcgttaccggaatcttgctcttcgtagaattcctgccatacattttgcatgattcttaccttttcaaagtggtatgtggtcggaatgttacttgccttttgttctctggcagtaatggcgtagacacgatgccaggccttgtcttccgaagtgactgtatatcgtactggagtcgtgaagtcctgaacactcccactggcaggactgatggtagcccccggagtcaattcaaatatgggggccagacttgtcatgtccgtaccttctttcacactgattcgtattgggtaggcgttctggctttcgtcgtacgacgggttcagatcaatgtatgaatttgccagtacatcttcttcaaaagagatgcctgttatatcagcttcagcattgggtgcttcatcttttatgcacgatgccatcaatattccgaaaagtgaatagagtatgaataatttgtttagtctcatgctttttaatttaattctattaattttttcaagcagcaaaactacttcttttttctctaatagcaggtttttatgagcttatttaacaaaaaaacggcaataggtgcttgactattgccgttttatatataaaaatgttctatttttaattatctgagccgatatgtacgatttttcttttggctcttactggcttttcctttacaacttccactttctgttcgggagttatacctgccagttccgggtcaatcatgatacggccacaatattcgcaaacgatgattttcttgcgtgagcggatgtccaattgtctctgaggcggaatcttgttgaagcaaccaccgcaagcatcacgctgtacgtatacgatacccagtccattgcgtgaattcttacggatacgtttgaaggactgaagcagacggggttcaatctttgtttccagttctttggccttgtctctcagcttctcttcctcttgtttggtctcggagatgatttcgtccagttcgctcttctttacgtcgaggtctttttgtctttcttccagcgcagcagtgctttctgctacttcctgagatttttcttcctcttgtgcggcaaattccttgatacgcttttcgcagagttcgatttccaatgtctggaattcgatttccttgctcaagaagtcatattcgcggttgttgcgtacgttgtcctgctggtctttatatttagctacagaagcctttgcggtttcaatttcaactttctttcctgcgatggaggatttcaactcggatacttctgccttgattctgtctatacgggtactcagaccggctatttcgtcttccaagtcttgcacttccagtggaagttcacctctcaacgtcttgatttcatcgattttggacagcattgtctgcaattggaacaaagctttcaacttctgttctacggttaattcctgaggatctttttttgcttctttagccattttacttacatgtattttatggggtttgtattcaccttggtcatctggacctcaaaatgaggaaacaaatcccggattattgtataaaatatttctttcgtatattgctcactttcataatgccctatttcagccaataatatatcggtatcatgtccgaaatagtcatggtattttatctcgccggtgataaagacatctgcacggttgcggatggcaagcggcattaggaaagcgccggcgccgccacataatgcaacagtctgtatttcccgtccgaggagtttgttatgtctgagacaccctacttcgaaggttttctttatccgtttcaggaattcaagttctgtctccggtacttccagttcaccaatgacaccggctccggcttgtacccatgagttttgcaagggataaatatcataggccggttcttcatacgggtgtgccgcaagcagtgccttgacagcctccgcttttttgtaggcgggtatgattgtctcaatacgtacttcacactcggtatgcagctcccctatcgctccacagtatggattggcgccttctcgggctcggaatgtcccctcgccttccagattataactgcacgaatcatagttgccgatattgccgcatccggcgtcgaacaaggcttttctcacgtcttccgcttgggcggtcggtacaaatgcggtcagcttcaccagcgcattttctttggcttccagaatacggacattcttcaaaccgattttctcggcaatcttgaagttcactcctcccggcgcattatcaaggttagtgtgcgcagcataaacaacgatgtcattcttgatggctttcaagatacaacgttccacataatccctgcccgtgatggacttataccctttgaaaatgagagggtgatgtgatataaccacattatatcccaatgcaatggcttcatccagtacggcttcagtaacgtcaagacacaacaaagcccctgttgcttccgcatctgtcaatccgatttgcaggccggcattatcaaatccgtcttgcaatggcagaggcgcgaaccgttcaagggcgcttactaattccttaattttcattgtgaacagaaaatttggttgcaaatatagtaaaaagcagtggattaaaaagaattccagtttaaaaaagtcttgtagactgtatatttatatgcaattgaactctttgcgggtatgatgtggttatttttgctccttttttcccttcttctccaccatcaccggcagtagcttgccgtaggcgtcgaacgacttgcaggaagccagagagattgtaatcatcagtgacagcatggaggcggtaaaggtgatgaccataatcatcatctgatatttgatggctacattcgggctgctgccacccaatatctggccaatcatggttcccggaaaagcaaccagccccatcacggatatattggcaatcagcggactgaaggatttgatgatggcttggcggatgaaaggtgcctgtgcttctgctcttgtagcaccattgccgagaagatatcggtaaagctgttgttctcgtttcaatccgctataataggtattgagggctatgacgttactggatagcatgttgcccatcagtatgccgaaaatagggatgaaataccgggcgctgaatacgttttccactctcagtactattccgataaagtacaagcctacacatactacactgcataagaaacctgcggatatgggcaggaacagaatcttcctcttcaattgcgttcgtgccaatgccgtctgcgatgctacgaatatcatgacaattacccatagaaagtttatccacgggttatcccataagaagaggtagttcaagtatatgccgatgaagaacaactggacaatcatgcgtgccgtacctatcacagtagcgcgcaacagtccggtcttgaacttccatatgtaaaacaacggtattaataatagcaataatccgatgcccaggctgaggtatgatatatctatggttcccaatagtgtgtatgttatttcatgattatatgtcggtcgcatccgtcggcaaatcttttgtcatgggatacggtcagtatggtatttcccttttctgtctgcctgcggaagaaagaaagtactttttccgcggaaccggagtcgagagcggaagtcggctcatcgacaatggtcagtggcttgccaatcattgaggctacggctatcatcatccgttggcgttggcctccggatatttcgtttacccgtttgtaatataactcccgctccagacccaaatcctcgaaacatgcaaataagcgggtttcagaaaaaggcgtgccccggtttgcctttagaccgaagggcaactgtaccatgtcctttacccactccagcggcaatgccagttcttgtggaatccatgcagtctgcttacggacaacgtcgacgtttcctttatccagcggaatgccgtctaatacgatacgtccttcttttaacgggataaacccgagtatggcattcagcagtgacgactttccgcatcccgaagggccggagatactggctatctctcccctttccaattgcaggttgaaacccgagaaaagtatatcgttgccgtaggcgatactggcattttctatttgcagcatggtgttcctttaatctttctgtatcgcaaagatagtgcaaaaaaatatttgtgctatctttgacgcactaattaattcaggaaagaaagactatgatacagaatgaacgggattgccgccacgaacatgtgcttgatgtggcaaggcaaatgctgactgctgcgcgcacggcaccgaaaggaaaaggtattgatgtgattgaagctgcgctggttacgggtgaagacattaagaagctgtctgaaaagatggtcgctatggttgaagagcatggtatgaagttctttctccgtgatgcggacaacattttgcaggctgaatgtgtaattataataggtacgcgcgagcaggcgcaaggtttgaattgcggacactgcggttttcccacttgtgccggccgtccggagggagtgccttgtgccttgaatacggtggatgtagggatagccataggctcggcttgtgccatggctgccgatttgagggtggatacccgtgtcatgttttctgccggacttgccgcccagcgtttggattggctgaaaggatgcaagactgtttttgccattccggtgagtgcatcctccaagaatccgttcttcgaccggaaaccgaaggaagataagtgataattgacgagtagaggtttgtaatcatagagtagaggtttagaagtctgaagtagaggtttggcaattctaaacctaaggtttattctccctctctctgctaacttaaaaagtaacgaattagaaaagataaataatatgggatattttgtaggacttccgttggggggtgccgcagagaaggactgtcaggtgcgttttggcaagaatatgacttttcaggtagagacacgtgctccccacttgcctgccgaatgggctttgcaaagcggcatacagcttacatggccccatgcagatacagactgggcctatatgttggacgaagtgcaggaatgttttgtagccattgcccgcgaaatagccgcgagggagtcattgctgattgtaactccggaaccggatgaggtgaagaaacagattttcggcagggtgaatatggaaaatgtccgtttcctgaagtgcgaaacgaatgatacttgggcacgcgaccatggagccatcaccttattggatgctgacggtgtatctctgctcgactttaagttcaacggatggggattgaagtttgcatccgataaggataatttgattacgcgtcgtgctgtggaggcggaagtgatgaaaggaaagtatgtaaatcgcttggggtttgtccttgaaggcggttctattgaaagtgacggtatgggtacgctgcttaccacttctgaatgcctgctttctcctaaccgtaacgggcagatgaaccgagtggaaattgaggaatatcttcgttccgtctttcacttgcaacgtgtcctttggctggatcacggttatttggcaggtgacgatacagacagccatatagacacgctggcccgtttctgccctgccgacacgatagcctatgtgcaatgcaaggatgcggatgatgagcattacgaagaactgcatcgcatggaggagcaactaaagactttccgtacgttaaagggggaaccttaccgtttgctggctctgcccatggccgataagatagaagaggaaggggaacggcttcctgccacttacgctaatttcttgattctgaatgatgcagtgctttaccccacctatcgccagccggagaatgatgcccgtgcggggaaagtgttgcaggaggcttttcccggttatgaaattatcgggatagattgctgtgctttgattaagcaacacggttctttgcattgtgttaccatgcaatatccagtaggggtgttgaagtaatgttgattacatagtaaaacaataaattatagaataagatgacaaagaaaataaaagtaggtattatccagcaggccaataccaaggacctcaggactaatttaatgaatttggccaaaagcatagaggcatgtgcggcgcatggagcccaattggtcgttttgcaggaactgcataactctctgtatttctgtcagacggaaaacacgcagttgttcgacttggcagaaccgattcccggtccttctacggggttctattccgaattggctgctgccaacgatattgtactggtcacttctctgttcgagaaacgcgctcccggattgtatcataacacagcggttgtttttgaacgtgacggcagcattgccgggaaataccggaagatgcatattcctgatgatcccgcctattatgagaaattctattttactcccggtgatataggcttcgaacctattcagacatctttgggtaagttgggggtattggtatgctgggaccagtggtatccggaagcagcacgtctgatggcactgaagggagctgaaatactgatatatcctacggctatcggttgggaaagcagtgatacggatgatgaaaaggcgcgtcagctcaatgcttggattatctcccagcgtggacatgctgtagccaacggtttgccggtggtttcagtgaaccgcgtgggacacgaaccggacccttccatgcagaccaatggtatcttgttttggggaaatagttttgtggccggaccgcaaggtgaattcttggcccaagcagggaacgaacgaccggaaaatattgttgtagaggtggacttggaacgttcggagaatgtacgccgttggtggcctttcctgcgcgaccgcagaattgatgcctatgccggattgacaaaacgatttcttgactgataacgacggggatttctgggggagaactaacggaatgtcacccgtttgttcatcaggaaattgacacttccgtagatgaataatcccaggaactgggcaaggtactcgttgcagtccagtccttctaccaatccgatgaggaaaaggaattgtgctccataagccattccgaaagctatggaaaagagcagcacttgtcgccaagtgttgctctttttttctgtagggaatatccagtacttgcaccagatgaagttgtgtatctgtgcaagtatatatgcggttacattggagagcatatagttgatgtccagttcgtccatcattacccaaacggtaacagccataatcaaggcattcagcgtgccgattaccgcaaaacgaaaaatgcgtgcagactctttcactctcctactctgtacctgcttttactctttcacttcaacaatcagattcagttcgtccagctgcttctggtcaataactgaaggtgcatccagcattacatcgcgtccactgttgtttttggggaatgcaatgcagtcgcggatactgtcgagacctgcgaagatgctgacccaacggtccagaccgtatgccagaccaccgtgaggaggtgcaccgtatttgaaggcattcatcaggaagccgaactgctcctgagccttctccggagtgaatcccagaatctcgaacattttggcctgcaactgtgcatcgtggatacggatggaacctccacccacttcaataccgttgcacaccatatcgtatgcatctgcacggacagctgccgggtctgtatccagcaaaggaatatcttcgtctttcggatgagtgaacgggtggtgcatagccatcaggcggccttcttcatcgctccactcaaacatcgggaagtcaaccacccaaaggcagacgaacttgttcttgtcgcgtaatcccagttggttacccatttcaaggcgcaactcgttcagttgcttgcgggtcttcatggcatcgtcaccgctcagaatcagaatcaagtcacccggcttggcgttgaaagcagccttcatttcctgcaatacttcctgcgtatagaacttgtcgacacttgattttacgttaccatctgcctccacacgcgcgtataccatacctttggcaccgatttgcggtcttttcacgaattcggtcagtgcatccagctgtttgcgtgtatagtgtgcagcgccttctgcgcagataccgccgatgtaagctgcattgtcgaataccgggaatccgtgtcccttcatgatgtccatcagttccacgaacttcatgccgaaacggaggtcgggcttgtcactgccgtagtacttcatggcgtctgcccatggcatgcgcatgaacggctcgttcatttctacgccacggatttccttgaacagatatttagccatgccttcgaagaggttgatgacgtcatcctgctccacaaaagacatttcgcagtcaatctgtgtgaattccggctggcggtcggcacgcaggtcttcgtcacggaagcatttggctatctggaagtaacggtcgaaaccggaaaccatcaacaactgtttcagtgtctgcgggctttgaggcaaggcatagaattgtcccgggttcatgcgtgaaggaacgacgaaatcgcgtgcaccttcgggtgtggagcctaccagaatcggagtttccacttcgatgaatccctggctgtccaggtatttgcgtacttcaattgtcattttatgacgaagctccagattgctgcgtacgttggcacggcgcaggtccagataacggtacttcatgcggatatcgtcgccaccgtccgtattttcctcgatggtgaagggaggggtcagcgatgagttcagaacatccagttccgatacgatgatttcaatatctcccgtcgggatatgttggtttttgctgaaacgttcgttgacggtacctttaacctggattacgaattcacggcccaagcggttggcacgctcgcaaagttcggcattcacctcttcgttgaacactaattgggtaattccgtaacggtcgcggaggtcaatgaaagtcatgcctcccatcttacggctgcgctgtacccaacctgccagcgtcacttgcttgttaacatcggagatacggagttctccgcaggtgtgtgatctatacatctttttatttactgtttgacgattttacttatttactattttgaacatgcaaaaatacataaaacatattatatggcgcatcaaaaggggaaagttattttcagaaactccttatacagcctttttacaacatcacattttcgtcagtttcttgaattgccttttgcctttatccagtatcattttgtttttatgggcgatgtcttccacaaaagcatcattaatctgtttcagtccgttgatgtagtcttgtgctcgctgcaagacgttcgaagtgtctttttccgcatcccgggggacaatgacctgcagtcctttcttcataatctttacatctacattctctcccatcatcatcgggtcgccgtcaaagtggactactcccggtttagaacggtgaatgcggagtgcttggcagcggaacgtcttaatccggctgttctggtcgatggtcttgttgaagagctggaaagagagggacggtacatcgagtacggtgaacggttcaagtatggtgacgtccagcagtccgtcgttcaatgtggcttgtggggcaatatacgcattgttcccatactgcgatgcgtttccgcaggctatcaggaacgctttgtatcgcagggtactgccgtccatttccagttcataggtttccggacggtactttaggctttcgagcagggtcttttccagataagtgagcggccctctccttcccgccttggagaattgcaggcttacaaatgcgtcgaatcccacgccgcaggtacagaagaagggcacatcgttgatttttccgtagtcaatgatgtctatcagtccgtcattgatgatgtcgatggcctttttcggctccatcggaatctgcaggtggcgggcaagtccgttgccggaaccgcagggaatgatgcccaaagcggtttttgtatgtaccagtgagcgggctatctcattgatggtaccgtctcctcctatagcgatgacggcatgtgcgttttcttgtgctttctgtgccgctatctctacggcatggcctgcccgttcggtataaatcacttcttgtgcatacctttccttatccagcttttcatcgagccatttcagtatctgctccttactttgagtgccggatatggggtttatgataaatgctattttcttcttgttttcgttcatgcaaaggttgttgctatgcaggttttccaactggcaaaagtaatataaatatctgaaaaattaaccacataattctttttaaaataagtataagtagtttttttaatgtaaatagaacatataccgacatattttgctatctttgccccctgtttttttaagacttgcatttaatagaattaaatattcattatataaaagatatttcatgggtttactacaagacaaatttgcgaaatacgacctgccgcaacagttcatggcaaaaggcgtatatccttatttccgcacaattaacagccatcaggatacagaggtaatgatggatggtaaaaaggttctgatgttcggctctaatgcatatatgggactgacatatgacaagcgtatcattgatgcctcgatagctgccacagaaaaatatggcaccggttgtgcaggttcccgctttctgaacggaacactcgatatacatgttgaactggagaaggaattggctgaattcgtaggaaaagatgaagcactctgtttttctaccggatttactgtaaacgaaggtattattcctgccgttgtaggccgtggggattatattatttgtgatgaccgtgaccacgcttccattgtagatggccgtcgtcttgcatttgccactcagttgaagtacaagcataacgatatggaggctttggaaaaagaactccagaaatgcgaaccggatgctgtaaagctgattgttgtggatggagtattttccatggaaggtgacttggccaatctgcctgagattgtccgcctgaagaagaaatacaatgccagcatttatgtggacgaagctcacggcttgggagtattcggaaaacaaggccgtggcgtttgcgatcatttcggtgttaccgaagatgtagacctgattatgggtacattcagcaagtcgttggcttctatcggcggttttgtggctggagacaaggcggtaatcaattggctgcgccacaatgcccgttcctatatattccaggcaagtagcacacctgctgctacggctgcagctcgcgaggcgcttcacatcatcaagtccgaacctgaacgcatccaacgtctgtgggacatcactaactatgccttgaagaagttccgcgatgcaggcttcgaaatcggtgagacagaatctcctatcattcctctctatgtgcgtgatacagagaagacatttatagtaacgaagctggcttttgacgaaggtatcttcatcaacccggttattccgcccgcgtgtgccccacaagatacgctggtgcgcgtagcgttgatggctacccacaccgtagaacaagtggattacgctgtagagaagttgaccaaatgcttcaaggcactggacattatcaagtaaactgattcaaacagatattaggaaagccgtttaataatgattaggcggctttttgtttaatacgaaacggaatagggctaagattaaatcgtaaagtatatgaaaaagaacttcttcatcattgctgctgtagtatgcggaatgagttgtaccaccactgcctatgcgcagttcaaaattggtggaaagaaaatcaatgtgaccaaagttgtccaagccggtacagatgccgtcaaggccatttcattgtccgatgctgacattgcagcgatgagcaaggaatatatggaatggatggatacacacaatccgctgacaaagcccgatacggattacggcaagcgtctggagaagctgactggaaatatcaaggaagtggacggcttgaaggtgaacttcggtgtttacgaggtaatagatgtgaatgcctttgcgtgtggtgatggcagtgtacgcatctgcgccggactgatggacatcatgacggatgatgaagtgatggcagttgtcggtcatgagataggtcacgtcatccatacggattccaaagatgcgatgaagaatgcttacctccgttcggctgtgaagaatgctgccggtgcggcaagttctacagtatccaaattgagtgattctgaactgggtgccatggccgaggcattggcaggtgctcaatactcccagaagcaggagacagaagcggatgattatggctttgaattctgcatcaagaataatctcgatccgtatgccatgtacaatgctttgaacaaattgcttgaactttcagcggaagcaccgaaggaatctaagttccagaagatgttctcttctcatccggatacagccaagcgcgtggcacgtgccaaggagaaagcggatgaatatatgaaagataagaaataactatccgttgcttactatgatgaagtgggatcagaggtttctctgaatcccactttttttgtgccgagactatgatataggcttctggggaagctgatagggataattcgttagttcacagtgctgaacactttgttttagctacagaaaacaaagtgtttttatatgatgaaacgaaatgttcttttaagggaaacaaagtgttccctttaatgaaacagactgttcggttaagggaaacactttgttctgtttggcaaaacaccttttatttgcttatttgcttttaaatcagaataattttagtatgtttgccacattatttatgaaaaacatgacttttgtatgaaaaagcaagacttcctctttatttttgttctggtgataatattcctgccattctttgtgagtgaacccgtttacgattggtataagtctttcaacgctgcacatggaatggtaatgagtttcattaaattcggaattcttgctacactgggtgagatgctggggcttcgtatcagtgccggagtctataaccgaaaaggatttggtgtactgccgcgtgccgtagtgtggggactgttgggaatgggaatcaacgcggccatgattatcttctccaaaggtgtaccgcaatttatggaatatatgggaatggcaaatgccgctgctatcataaacggggagttttgctttgataaattatggatagcttttgctatttcagttgccatgaacactatatttgctccggtattcatgacattccataagattacggatacacatattctggattggggcggctctcttcgcagcctcctcacccctatcccgatgacccgcatcattacgcatctgaattgggatgcacaatggaattttgtcttcaagaaaacaattccctttttctggtatccggcacacaccattacattcctcctgccaggagaaatgcgggtgctgtttgctgcgatattgggtgtggtgcttggggtattactggctattgcggcgcggatgaaatgaggtgacagctacccgatatccattcaggcatatcgtaaagcaggtgatgcctatagtaaaaagcaagggtagcagaaagtgaaaggcgtttggagtggcatggtatgcaaattgctgtagccaatatgtcataaagagataaatgacagggacggctacgacgaatgcgatgcctacatagctaaggaacggataattgataagccatagaatctgacgggcggatgcaccgtgaattttacggatgcttatttcacgtttacgctgtgagacggcataatgtgtgatgccaaataatccgaaaagagtaaggaatatactgacacaggcgtacatgaataagatatgcgagaagtgtgttatgtcctgattgtaggacataaatttctgatacatatcatcatatttcaaaggaatgcctggatttttcttttcgtatgattctcttaggcaattaatgactttatctttatatccggcttttacctttataactagagttgagaaattatcttgtggagtatcataaaggagtattcgtaagggagccacttggtctgtcatggagtactttttgaaatcctttactataccgataattgtaccttttgtaagttcttctctttcgtgtacatacttggaaatgggctgtccgataggattttctccttcgggcaccaataaatccacgaatgtttcattgattagtgcaggttgtggagtacgggacattagatggaatatttgcagggagtcttgcagttcaatatgatgcattgttaggaattccggacaatcctcgtataattccaacatgagcagattgtcaccggaatcatccttgcccgggattcctaaactcatcggatatattccggtattggaggttattaccgcttctaccccttctatattcttcacctcatctatccgggtctttagcgtcggttgtgcattggcatctgtatatacattaataatattctcatagtgcttttcttcctgcttaatcagatacatctgtgaacggataatcatgaatgtactcatcaagccaatggagatgatgaattgtatggttaccaataaggccacaatgaaacgttttttgcgtccggtaaagaaatgacggtaattagtttcggatatggaatgcaacctatgactcatataacttgccggtatgacagacaatattatgataaacaacaagataagagggaacacttgccatgagaacaaatattccattgtcagtttggcagaaaccatatgattaaatgcaggcaataagtcattcatcaacaataaagataaaaggaaagcgacaagaaccatcagaaaagtatccaagaacagttgttggcgcatttgtgatcttgtggctcccattatggattcaatgtgaagcatgtgcacttgacgcaacaaacgggagaaactcagatttataaagttgaaacaaccgatgaatagaatcagtaatgcggacaacagccctacacccaataaggtgctctgctgatgtttgataacttgattactgtcttttaccgtagcgtcgaaataagattcttgcaatgtttgggtacgaagatgtccgtttcccaacaaagtgggcagttctgtttctccgaaacgttggcggaatttctttatatccgtaccttctttcagcaatagcatacaatcagagctttcggtagcttccaatggtaggagtatgtctgtctgcatcatgctttgctccggttggctgaatacggcaacgatgcgtctgatacctatttcgctcaatagtatatctacattttttcctatacaatctgttgtaccgaaacatttcttggcaaacagttcacttacagctatgtctcctggtttcagtaatgcgtcttgaacatcccctactatattatggaaagggaaaaaagccgttaatgttgaatctgctgctaccaagctccagctttgaaattcttgtccttcaatctttacccttacattcttgaatgtttgcgtacgtaagtaagactctatttccggaaactgagatactatttgaggaacagttccaccgtatatgaatgtaccttccactgcctgttgggcaaaaggtagagtctggactaaacgcagaatacgatttttgttgggattattgttctcaacgttatattcgtgtattacaaatgccatcaacaaagtggtgcaggcaataccgacgaccagactgacaagggaaatggcaacaaacagtttattgcgtttccagcttctcatgactaattttaaggaaaggtaagaattcatatcatgtatataaaaggttcgggaaatctataggttgacgatgtacgactgaaatttgtattgccaaacgcccgcttgctgacaggcacttagtaaattcaaaagtggcatcaatcgtacattgtcaactcataaatgaaacaggggttatcacaaattggcttctgtcaccacttgtccgtcaaacagattgatgatgcgtccggcaaaaccggcatcatgctgtgagtgtgtcaccataacaattgtggtaccttctttattcagctcactcagcagttccatcacttcttttccattctttgaatcgaggttaccggtaggctcatcggcaagtatcagcttaggatttgatacaactgcacgtgcgatagcgacacgctgttgttgtccgccggacaactgttgcggaaaatgcttactgcggtgcatgattgccatacgttccatggcggtttctacccggcgcttgcgttcggcggcaggaatgcccatgtagagtagcggcagttcgatgttctcgtatacattcagctcatcaatcaggttgaagctttggaatacaaagccgatgactcctttgcgcaagttggtacgttgggcttctgtatatttggatacttccgtcccattcaaataatattctccggatgtaggattgtccaacagaccgaggatatttagtaaggtggattttccgcagcccgaaggtcccatgatagcgacaaactccccttctttcacttccatgtttacgtcgttcaaagccagagtctgtacttcctcggtcttgaaaatcttttgtagatttactgtcttaatcataatgcttggtttttatggtttataaatatttcatttcttattcgtttttaatgacttctgccggatttgtccttgctattttcagaatgcggaaaataatagtcagagtagtaatgacagctacgattatgaagattgaaatccaaaatagcgggccgtcattaaagaatacgatatacatgtttttccataactgcagtatggcataacataaaggaaatgctagcgctgctgagagtacaagctgataaatatacgtacgggcaaacaatatgataatctgtttcaatcccgcaccatttactttacggattgccacttccttttgtctgcgttccgtatccagtgtgattgccgaataaacacctaataaagtgattataaggctgacaaatgagaagaataagattatccctttcatgttgttctcgatggcttgtgcttggtgaatgtcttccagtaaggtcgaaatgtgtaattgtatactcggtggaagattctcttccagcattttcttaacgtaagtctttacttcttctgcttttccgggtacacacttcaaatagcaatgacctacataatatttgaaatcacaaggcagaaagacgaagccctggctctgattgtaagtgtcggctacaaaatcggagcaaatgccgcataccgtgtagctgtcttgataattgtacaaggtggttcccagtaaatccttcttcatacgttttgccaatttacggtctgctaccatgtcactatttgtcttcagggcatgcccggagagaatagggatattcataaattcgaaaaagttattaggaacattcattatattgacttcaaggctactttcccggttatctttttctgtctgcatgcttgttcccgaaatacctttcagataattaatttctgtcagtattttatcttttatatccggatgttgactgatgcgctctatgagagcaagcttttcgtcattttttagaaaacggtaatccataggaatactgatgatttcggacttttctttttctgtcagtgtgttgaacagtgtggaaccggtcttgtcagcctgcaaatataaagcgactgtaaagactatgaataaccaacagatgaaaaactggatacccaaaagacaatttcgtatcttctgtttgtggcgtttggatttgtttttgtaaatacttgactggatggaggcatgcttcatcctccatacggtaaacaagcagagtaataagcatagtaaaataatgcctgccatatattctgttgtctgtatcaataataggtcccgttcaatgactaatgtgaaatcaaataaagagaatgaaaggtaggggttaaatatttctatcagacagaaagtcaataagaaggttatgaacgaaatgataatggcttgggtaaaaagtaaccaaaatagttggttgccattacttccattcactttacgaatgccgaactcgtgcgaacggttcagataactccccgtcaaaaaatgaaaaaagttgagtagaccagtcagtagaatcaaaaggccgacaatgaatgtgattccggcaaagtaaggggcaacggatttctcccgaaaaagttttccgaaattcgaggctgatacggtatttttctcattgaatattgtgtgcttcaagtccattgcacggaaacttgcttcaagttgcgcggatgttttgcccggacgaagaagagcaaaagtaagtccaccggtcatactgtctcgtccgtcgaattgtataagtccttcgctgtcgttcaagattaacatatcaatcttttggagaaagctaaggctggtattcaatggaatatcttctattatcgcttgtatggtatagatggtacctcctgttcgtggtgtggtatcaggtgaagagaaaagccgttgtgctaaggtcattcgctttcctatcggattctctccgagaccaaatattttgtgtgccagagagcgggtcagtatcacggcattgggagtttgcgatgctacagtccatgaaccttgtaatatttccggggtgaacacgctatggtaggttgtatctacttccatagcatataaatcttcgtaaggcagttcttccttgtcgatagtttccacattgtagctacgtgggtggggataggcaacaaaagtaaatgcttctacttcttggaattgcaattggcgcagactctcaaacaacgtagcgggagttccgaaataaggttcttctgctggagtgtataggtttatgtctgcaatgcgttcccagtgggtaaagcacttgttggtagaatttatatagcggctgcaatataggcagatactaaaacaaagtatgcctaccgacagtccgatgatagagatgatattctgtgccttgtactttaataggtttctgaatgctgttttaatataatgtcttatcataatagtatttattattgtattattcgcttttgattacttccgccggattctgccgtgctgcctgaacgacttgctgcaatatcgtgaagagcaccatgattataacaattcccaaccaaacaatgaataaatccatgccaatagatatgtggtaggcatattgttccagccaatgatgcatcaccgcgtatgtgcaaggaaaggccacaatcgctgcgatgtaggccatccataaatattcgcggaagaacatgccgattattttattgacattagctcccataatcttgcgtactgctatctccttccttctttgccggatggtggaagaagatatggagaagatgccgaacaaagaaatgacggctaagattatttgtctcatagtgcgtcgttttatttcattatcaattcttccgcctcgccaaaggtatcatatcccgttgtaattacccaatctccgggctgcaaaccttccgtaatctcgtattgttgcggattttggcgaccgatgccaagcggcacgcgcacggcttttgtctttgcggcgttcagtttgtaaatccattgtcctccggtactctggtagaagttgccgcgcggaatgacgagcgcctcctccggctggccgagttctatctgtacccggaagcttttgcctacacgtacgttgtcgggcatgtcaccggtgaagacgaggtctacgtcgaacgtgcggtctttgacttcgggaaccactttcgtgatgcgcaacgggtattttcttccctgataattgatggtggcaggcaatccggtgataatgcggtcgatgtagtattcgctcagggaagtatgcactttatattggtccagcaccttgatttccgcaatgctttcaccggaagcgacctgctgtcccggagtcaccttgacaaaactgagctggccggcgacgggagctttcaccaccaggttgccgagccgttcgcaggcgcgttcatacttcttccgttcccgttcacggtcgttcctgatgaggtctttgcggatgacggtgacggcagagtcatgacgaaggctttccctttgaagatgggcatttttcactttatagttgtattcgtcctcggaaacttcgagctgcgccttgctcttgatgcccatgcggtactcctccttgtcaagggcaaaactcttgcgcaggcggttgaggtcataatcggtctgcagggcttgttgttgcaggttcaggcttttctgctccatttcaatctctttttcgcggtaggtgataagctgcttttcccagtcgtcgcgctggtcttcgatactgcgcagcaggtcggggttttccatgacgaggatggtgtctccttgccggagcaggctcccctcctctcctatgatgcgttccacgcttccggcttcacgtgcattgaccttgatggtaaggatgggctgaatcactccctccacatctacatattccataaatttgccgttcttgacttcggctatctgtatgttgtcttgctcgatgcgcagtttgctgggacccagcgaaagggtgactacataaatcaggaaggtaaggaaggcaacgcctcccgccagatagtagcggtaacggatgtaccagggtttcttttcaagttttatatccataatgcaatattttatatactctttttttacttttcagatactcccttcagaagtacttctgaataagggttccgagttttactaaaacttcaccggagatttagtaaatcgtcaccggagttttagtaaatctccggccagcttttactaaaactattccacgattctattattgtatagattcttcattagtaaccctttccaagtcttctgccagtggcctctctttttcaaagtcatatagcgtgatgcttctcagtgtatagtacagactccaatagttgtacaaagccgttatatagcttctccgggccgtatctttttccgtgatggatgcattgaggtcgagtaccgaggactttccgagcagatagagttttcgggctacttcggcgcgtcgttgggctgtatggtccgtgcgggcggctatgtttacccgttgtgcctgcaggttgaattgcttcacgagtttccgtacgttcaagtcgaaatccgtcttgtcttgctctacctgcgtgtagacaaggtctcggttggaacgggccacgcgtacttgtccccttccgcgcccccagtccaggattgggagggtaatgcccaggctgacgtactgctggtccagtggattccggtaggcatctttcagcttgtcggcagtttgcgtcaagccgaagcgcaggtagatgtctgctttcagtccggcattggccttggcgcgagacacggcactctcgctttccaccttgcggcgcagcatgttctgtatctccggactgttttcgttggcaagcatcagtgcggcatccaggtcgatgtgcaggtcgggcacgcggttgtctattctcacctttataaggaggtcttcttggatgccgaggtaggaacggagttcctgcatgcagttttccacttcgatgcgggcattcatgcagttggtttcttcggtcagtttgttgagttcgagttgcaacatttcgttttcgctgatggtgccgatgttatatcgtccttgcgcatatatatatataaggtgtctgcattggcgtagttggcgttggctatttcgtagttgctttgtgctttggccaggttgaagaacttctctgtggcattggcggcaacaagttcaagggtttctacgtaggttttcttggcttcgcgataacggataggttcgatgcgccgatcccacttcaggctgttgtagccaaacaaggactggctgtatccgatgttgacgggtgaagtctgccaggaataggtgtcactgctgaaaaggtcgagacgctgcgcagccgtttcaatgaaaaaggttcctccggtccacggcacgttttgtgtcagactcagtgtcaggtcagtgctcagcaggttctgctctatgaacttgacgttgccatcgctttgggtcactttgttgatggcacggtccagatagggattggaagtaagcttgagcgtcggcaggtagttggcacagtagtatttgtagttccaataagcggaacggaagctatggcgggcattttgggcgtcgggcgactgctggcgggcctgctcgatggtttcttccaaagtcagctccagcgtgtgctcttgggcaacggcactcgacatcagactgaatgtaataagcaataaaaatatattccggtgcatagttgttttctttactctataaagttcaaattctatgccataagtataagttattgtattataagtgtttgttgtggttcgaagctttccaaacgtgtgcagttgcgcacaaaaatagtgcgataatgcacgcacaacacatggatattatacttatctttgcccatacaagagatgtgggattgtgtaggccttgcctgcacgaaaagaaaacagatatggagcagtttggtaaaatattgattgtagatgataacgaggatgtcctttttgcactgaaccttcttctcgaaccctacgccgagaagataaaagtggcagtgactcccgaccgcatcgagcattttatgaccactttccgtccggacattattctgctggatatgaatttcagccgtgatgccatcagtggtcaggaaggtttcgacagcttgaagcagattctgagtatcgacccgcaagcagtggtcatcttcatgactgcctacgcggatacggacaaggcggtgcgtgccatcaaagcgggggctacggatttcattcccaagccgtgggagaaggagaagttgctggccaccctttcttcgggcatgaagctgcgtcgttcgcggaccgagataaatctgctgaaagagcaggtggaagttctgagcaatgtcacagcaggaggctccgaagagattattatcggtgattctcctgtcatgcagcaagtcttctctactgtggagaagttgcgcgatacggatgccaacatacttatattgggtgagaatggaaccggaaaggatgtgattgcccgcctgctttaccgcaattctccccgctatggaaagccgtttgttacgatagacctcggcagtattcccgaacagttgttcgaaagcgagttgttcggctacgagaaaggcgcattcaccgatgcacggaaggcgaaagccggacgtatggaagtggcaaccggcggtacgctttttctggatgaaataggtaacctttccctgcccatgcaggccaaactgctgactgccatcgaaaagcgttgtatcagtcgtttgggaagtacgcaggctacgcccattgatgtgcggctcatctgcgccaccaatgcagacatccgtcgactggtggacgaaggagacttccgccaagacctgctgtatcgcatcaacaccatcgaactccatatcccccctctgcgggaacgcggaaacgacatcctcttgctggcagagtatttcctgcaacggtatgcccgcaaatatcagaaagagatgcgcgggctgacccgcgaggcgaaaaacaagttgctgaaatatgcctggccgggtaatgtacgtgagttgcagcataccatggaacgtgccgtgatactgggaggcggctctttgcttcgtccggaaaacttcatgttccaagcttctgtttcccgtcagaagaaggaagaagaagtcctcaacttggagcaattggaacggcaggctgtggaacgtgccatgcggctcagtgaaggaaatgtgacccgtgccgccgaatacttgggcattacccgcttcgccttgtaccggaaacttgaaaaactgggcttatgaaacgatattcattgattgtggcactgcacatcatcggcatagccttcctttcggtcggcgtttatctgctggtggatgccggactgtggttcagtacgctgatggcttttttgatattgctggcgattgccgttcatctttaccgcctgcagatgatgcaagtgcgtatgatgcgccatctggcagagagcctgcgctatgacgacatgatgctgtcgttccgttctccctacaagaaccggtctatggaggatatggtggatgagctttcagaagcgatgaggaatttccgtacccgcgtgctggaacgcaatgagatggaagcgtggcaaaagctgatacgtgtgctgacgcacgaaataatgaattcgattactcctatcatctccctctccgagaccttgagcgaacgggaagtgtcggaaaagaactaccccgtcatgcggcagggaatgcaaactatccaccgccgtagcaagggtttgctggagtttgtggagaattaccggaagctgacaagacttcccgcccccgttcgtcgtccggttgctgtccacgaattgctgcaggatttgcagaagctgttttcggaagagtatatccggatagagcttccggagatcgaccgcatactccagatagaccggacacagatagaacaagtactgattaatctgattaaaaacgccaaagaagcatgtagcaggaaggaacatcccctgatagaagtgaagatgctacccgccctctcgtggcaatgccttattactgtcagcgacaatggcgaaggtatcttaccggaagtgcaggataagatttttgtaccgttcttcaccaccaagccttccggctcgggcatcgggctcagtttatgtaaacaagtgatgaatcggcatggcggcaatattacggtgcagtctgctgtgggaaaagggagttgctttacgttgctatttggataaatggaaaagagggtatatacaaaaataagctactgaaaaaatcagtagcttatttaatttctgtcggggtagcgggaatttcactactgacaataagatgctgacaatccgttgcgtataaaactgtataactgtatattcttctattattgtctattagtgtatatcatcattattttctttttctatttttcgcaattcatgttcaagctcttctggctgaagtattttctggggattgcattcctttatccaaccttctatgaaccctttatgtgctccatgtatagcttcaaaaggaaatctcatagttttattagtatcatatttaaatagtacataacaattagaggttggttcatccaccttctgaatagataaagttgggaatgccttacgccatttctttatgaaactatcaattttgtaaacagaaaatatttctattgttctcattacttatttagtatttctaagttgttatcaccaaaaaccaatttaagcacttggtctttccgatctttttttaattttatctgaagaattgcttctacatcttcggatgtctttccgtcagaggtgtacttctgtggataagtgaaaacatctactatatccatattcaaggcacttgcaaattttgaaagttgccataaactcaactgcacctcaccgcttaatattttactgaattgagaagcagacgtacctgcatattcagcagcagcaccttgtgttaaacctctatctgatatgattttacgtatcttatctatgactgggtgtattggaaattcacttttctttttcatatctcaaatatatctattgattatcaatatgttataacttattttgaaacaaaatttcaaaatattcaattataaatttcatatattgaaaattcatttctatatttgcattataaatttcagaataagaattgtaatatttaagattatgaacgaaaaaacatcaaaaatggtacctaagaaccattacgaccaaatggaaaaagccacaagactgaagctccgtaacgagttcctaaaaagaagcggtatgtcattgattacattctatgacaaattaagaaaagactccttcaaacctttggaaagagaactatatgagaacattttcataattcaacaaaattaaaaatccaagcaaatgatttctgcacatgagaagatgatggaaacgatacccaaagagttcaaacgtataatgtctggagtagaggcggcggtacgcagcggaaaaacaagatacctcataagtagcagacatttaaaacctgaatatgaaagagctttgttaggtgttgggtatgaaattagaaaaggacgtgtagcaactcaaattatatggtagcatttatctccaatattgaattctacaacacccctgaaggtgatgtgatgatgaaagagttcgggcagccggctgttgttctcaaggaggctgaccgcccgactatcgaacacatgcttgctgtcatcagggacagatatccgaaagcacatgcccggctgatgcagctctattcagccagcacgatgaatcgttggcattatgaattccgggtagttcatcgtttcatccgatgcaatttcggagagtatgaccagtacaatcttgacattaacaaggatggacagtttgtattcgaggaggtcaaatgcccgttacggggtgaatgtgaacatgaaggggtgatatgcagaccggagcttgatacagcactgaccgatcgcgagatggatgtattccggctcattgcctccaactgccaaactgatgaaattgcggcagagctacatatctcgccttgtacggttaaccgccatcgggagaatatcaaggcaaaaatcaaggttcgcaatgtgggtgagatgatttcctactggcatcggaatcaaatgaaataagcccaccgtgaggtgtgccatctgtgtttaatgtgtattctatggctgtggcggtctgcgaagatagtccggcccctcatactgcattcaaatggtagcggtatacttaagatttgccgcgactggggttcgattcccctatatgagacgatgatttactaacttaataaacagaatatatgaataataacaaaggtttttcctccatttccactcctgacggacagttcaggatatggattccacgtccgacggcttcgggcagagtaatatgcaactgtggctttgcactcaagagccatcttcctttcgtcgatgccgttgatgcgctggactacctgcaggtagacgaagttcggcagatagaccaggaccttagtatccttgttatttcatttctcgatgcaccgcatgagtgcatgctgaagatgatagaagatatccccgaacttatggagcaatacttggtaaatacataagatctgaatgctatgagatactttatagacaacatcaagacttatgccagtgtcaacaaaaaaggcagggcattacagatatacgtgcaacagtttgaccgacatctgattgctgacgaatgttctttggatgcactgaagtgtgacatcgagcaccagattaaggttatgaatgagaaatatccacgcagccgtccggttcggctcgaggtatatgagaatgccaagggtggacagtggactattcttgtggagcatgacagtgacagtattgtctgtatcatatcctatgaaaaggtgatgggctattatgccttggcagataagatagatgaatttgcaaaaataggacagtgatgagtaatgtgattgtttttttatggacatctctgattgcattggtggccgccttgatactatgtgtctgggcaatgcggaaagcatccggaccttaccgaattctctttctctttgatattatcatcttgatgataaatattggaataataggatttgcaattgggtgtctatctaatatacggtaatatgagagacatgaaaatgacagatttcccgacatatccttgggagacccttgaccatgtatcaggacaacagttactgttacaatatccgtcctggccaacatgtcgttggagatttattcgacgattccaagacgaagctggtatcatacaacagaaaatcacatgtgcagataatctgtgtatgcgccccctacaagccgcctttctatgcgcgtgaatgtatgtatggtatatattcggcgtggaaagaaatcgaagaggacatctttaacttggaactggcgggatattctaccaagcaaaaatttccatccctatgtacatcacaccattatctttaaagtatgaatgagaatgaattaaccaaaggtgtttgccgtatttgtggttgtaccgatgacgatccttgctttaatccacgagtaggcaattgttggtggatagatgaaacccacaccttgtgtagccattgcgctgatgaagaattaagctgtgaccctgaaacacggcactgcattaatagcacttttgaatcagatgaactaataaaaaatgaagatttatggtaacgaaaacaacattcaaaaagaaatttccggacgttaaggtgcagaagctacagaccagcgttgtctttagcaggcagcaggtggaagaaaccgtattgaagatgtgcgattctctcggtgtcgggctgctttattacaattattccaacagatggataaccgtttatacctccgaaaaaatgaaaaaggcactggactcaatgaaaccggggtcagaggtctttcacgaacattatggtgtctatggtaaagtgataagcgataagccatttgtcatttgtggagaattgtgtatcagggttgatttcgggggaatgcctgaaggtggagcatatggttgtacatgttttgtaatgtaatcgaataaatatgaatatagagaaaatcatcttcaatctcctaagcgcacataggtgggttaggtattggatacaaaaagagattgtaggcttgacaatgcctggtgaatacgttgagataaggagttctttcttatcagatacagatcttgctgatattttagaagctggattcaaaattaaaagcatctgctcaaaaaaaatagatgcagatgcttataatgatgttctgttgatgcgtgaactttaaatataaccaaaataaaaatgaatataagtaagaatattcaaggatacccagttaagtgcgctggggttagaaagaataagcgtataaattcagcgtgtataatgtgcgacatatttgacataaagaaatattataccaaatcgacatggaggatttcaggcatcaatcaatgcataatgaacagaatgtgatgaatatttataaagtcaacgaatgggcggagttcagaaagaaatttcagagattactgccgaatatacctataatagacttacatgatgcactgttatcagctatcaataatagattggtaattgatataattgcgttagacaatagattgcagaatatgtatcctgaagaatgggagtgcatgtctatgaaggaaataattattaaacattatggtttggaagccatgcaattaatagaatcagtattatgatatacggatatttaagagtaagtacggacgagcaggactctaataatcagaagttaggagtctgcaaaaaagcggaatccttggggatgtcagttgatgattggattattgatgatggcatatctgggacgaaggagcctgaaaaacggttattgggcaaacttatgaagaaattgcaaaaaggggatgtgattattacatccgagctttcccgtcttggtagaaaattattcatgattatgcgaatattggagttctgtatgcttcatgaagttaaggtttatacagtaaaagacggatatgaacttggagataacatacaaagtaaggttcttgcttttgctttcggaattgctgctgaaatagaacgtgacatgattagccagcggactaaagaagcattagccagaaagagattggaaggcgtagtccttggtcgtcctaaaggcagaaagagttctcctgacaaatataaattgtatgggaaaaatgccttgataaaaggattgattgacgaaggcatatcacagcgtaaaatagcaaaaatatgtaaggttgatagaaatacgcttgcaagatttttgaaatatgaattaatcaattagagtataacaaattagtaatgaataaaaaagaaatatcaatgaaaaaaggtcagaaggtgcgcatcctgcgtaccaatcaggtagcgacaatcgtcgaagtggagttaattcgtaaaggtggcaaagtacatcggtactgccatctgaagacagatgaaaagtcatatttgtggctggactcttcagaacttggttgtgtggtggaggaagtgaaggtctcggtagttgatgaccggaaccgggaactgcacttggctatatgccaggactactccaaggataagatgacgctacatcttaccggtaagaatccggataatctgaaggaagcttccggactatatgcgagactgatgaacttgctcattgggagcctgaaagaaacgcgggaactgtaggagcggataacgtccttgatgatatggaaagcctattgaaatatagaatggaaaatcttgattggatagaccgtttcttggagaagcttggcgtcgacgcttttcttgagtttgagacgagggtatatagtgccctcgacaagctcaaggtcatgcattactatgatatcgggggctcggtcataccggagcagcaggaactatttatcaaattctgttgctgctatattaccgggcactctgaatacgaattcaatgaagactatacacagatatggaggaaagaaagctatgaacaatggaagatggcaacccgatgaggacagatacgtccgggaaaatgtcaataagaagacattggaacaaatggcggagcatttgggaagatccgcattggctgtacagttatatatgcaccggaagcatattgtagtgggacagacagtcaagcggaatctggtgcaggagattctccgactgaaattccggcatccggaaaatttcatgcccaaccgtgccttctaccaggaggtaggcatcaaccagatgcgctggtgggatattttctatggccgaaaaaatataaaccaagaagaatatatcgcgttgtcgaagtatttcggcataacactggaggaggcattcgcagcgcgtcaactttgcatatttgaagaacaatgattgatgacgaattaaaacagagaataaaggatgccaacgagattacggacgtgattggccagtttgtatcccttcacaagagaggtatcaattatatagggatctgcccgtttcatccagaccggcatccgtcgatgaccgttagcccgtcaagacagacatacaagtgtttcgtctgcggcaaaggaggggatgtcatccagtttgtccaggaccatgagaacatgtcattcaacgaggctgtcacctggctggctggccgtgcgggaatctctctccctgaacgggtgatgtccgacgaggaaacggccagggtaaaagaacgtgaagcgcagcgtatagcgatgaaaggcgccgcattctttttcgagaagcatcttccggaggcgcaactttatctgcatgacagagggttcagcctggatgacaaggtcctgaaggatttcagaattggatatgccccggcaggcaacctggctaaaaaggagatgcttgcagccggattttccgaacagaagctgcttgagacggacatcctgaagagaagcgagaagaacttcaccttcgacactttcaaggaccgcatcatgtttccctattttgatatcaagggcaacataaacggatataccggacgctggctgaccccgcaggaaaacaccggcaagtacgtcaataccggggacacgccgttgttcaagaaaggcactcaccttttcggtctgtaccaggcacgtactgccattgcaaggtatgattgtgcgtatatagtcgaaggtcagttcgatgccatgtccatgcacaagttcggtgtctgcaataccgttgccaccagcggaactgcactgactccggaacagatacagctgcttggccggttcacccatcgcgtgatacttgtatatgatgcggatgcagccgggctgaaagcgtcactggccaactgtgaggctttcctgcgtgcgggtttccaggtcagtgcagttccgcttcctgaagggaaagatcctgataatattgcccaggagcagaaacttgaaaccgggaaatggcttgcaaaccgggaacagaatttccttcaatattttgccatctccttacgaggcaagaatcccggaaccgacccaaacagagaggaagaggcaatgcaacggctttcaaccctcatatctgtcatcccttcggaaacacttcttctcaagtgcatagagataatggccgggattttcggcagcaacacggaagtcatccagcggaaagtgaattccatcttgcgacagcggaagacagcttccatcaaggagaaagacaagatggctcccggtatatatggtatcgatatgattgcggaggcacgtagcggaaatgagccttgcatcctgacatcagattatcaggagttcctcaccttgtatggagatgctcccatagcatacgtccatggcattcctggaatgaacgacatacagcagttgcgtcaggcaagccagatgttcacctctgacagtgatggccttactattgcaaaagacggtacggaatccggttaccttgccggactatctgccattttccgtgccggtatttccaatatcaccataacggttgaacggaatgtggataataatgatgacgaggaagaaagcgatgacggggaaaatatggatgaagagacgaacgatatcatcgagactttcaatttcgcgaaattctatgtattcctgcacaaatctttttttaagacctataatggcgagcgtgctccctatatagaacgttgtgctgaaataatcagctacgcggaagattcggtacgcatcatcaactttacctactttcagaattgcctggggctgaccaagcaagccctgaatgaaatactcaagccctatctggccaaacgcaaatcacgcatggccatcaatgcacaacggacggacgatgactatactgaagagaattatgacccggacgaacttccccgttatgtccaggacaatccggaatatctgcagatgttccagcaatgcaattactatccgaagttaaacaagcagggggagccggtatgctaccttttcaagaatgagaagtccggccataccatggtcggtgacttctatatgattccactcttgcatatttactcggacaacgacgaggaaaacaagcgtgtccttagaataaaccgccgttattacaagacaccgctttacattgaggtgaattccaaagtcctggccaagaaaagcactattgaggaaaagctgattatgctggaagcagtcaacttcaccaatggtgaagagaaacattggactaaaatacgtgaatatatgagcagacattatgttacttgcacagaggtttccacatacgggaaccaacaagaagacggtttctcccgacgggaagaccaacagttttttgcctttgccaacggcatcttccatgttgttgacggaataccgagatttgatgcggtgaatgagcttggagtggtcacccacaatggcaagaactattatctaccggcattctccaccatatatgccggttccggcaagcagtccgacaagtatgaacttatttcacagcttgtctataaggaaatccctatagacaaacgttgtactttcgacgaatgggcctcactgatggaccgtgtatataaaatcaatgacaacgggaaatgggccattctctttgccatcatgtgcgctttccgaagcaatatacactgcatagaccgtttgtttacagcaccattctttatgggaccgatgtcatccggaaaaacacagattgcgatatccatccgttccctattcatatctccgaaaataccaattttcaacctgaacatcggtaccgatgcagccatgtccacattgatgagcactttccgggatgttccggttgtccttgatgaatacaacaataaagatatatcagatataaagttccaggcacttaaaggaatagtatatgatggtgatggaagacagaagcgtaaaggcacatccggcaaggagatagaaaacgacaaggtgtacgcaccggttgtcatttgcggccaggaaactccccaacgtgatgacaatgcactcatgtcacgtattatagtctgcgaagtccccaaaccgaaaaaccggaccagggaggaagtggagcttttcaacaaactcaaggatatagaggatccggccaaaatcgggttgtcgaatgtcctctttgaagtccttcagctgcgtccgctggtaatgcagcatttccgggcactgaagcagaaatcctatgatgaattgaagcaggcgctgataaatgccggtgagattgaccgcctcatgaagactgcatcattgtttctggcgacatgcagactgattgaggattatacagagttgaaattaccgttcacctatgaggagttttttaaaatagcctgcgataaaatcaaattccaggtggaactgatttccaagacggataaactggccacattcttcaaggctatggatgtgatgattgataccaaggcaatcagggaaggcagggacttcgccattgatacaccggaacgaatcaccatcaagctgcccggaggagagaaaaaggaggtccctattcctgcaggaacccgcgtgttattcctacgcgtcagtaccatctatacgcagtacgcacgttcttcatataaccaggaagactcaacgcagtcgaccatcgagcagaacctccgctcccatcccagttatctgggctttgtccatgcacgccggttcaattggtatgaagtcgtggaggtaccacgcggcggtttcgaggaagatactcccaatgaaaccggaattccggtaaagcttaacaatgacatggtgcgtaaagttgagaagaagtgtaccaattccagttgcatagctatcaactacgaaattttcagagaattatatagcattgatttgcaacgcggttctgaagaatcccgtgttgacgataatcccgacaatgaccctatcggagcaatcggtgccccccaagagctgaagttctgatttttattataaactttaaaaaacgagttatggaaacaaaaattattacgagagtgaacaatgtggacatcgtctctacgagtgacgaacaactggtgcccatccgaccgatatgcgaggcactgggcattgatgcaaacggccaaaaacaacgcatcgaacggaatgaaatactcggtccagttgcgtgtatgatacacgcaactggaaaggatggaaagacgtatgatatgtatgccattccctacatgtacatctttggctggctcttctccatcgacacgttcaaagtcagcgaaaatgccagagaggccgtcctgcgttatcagacggagtgctacaaagcattgttcgagcacttcaccgagccgcaaaccttcctcaaacagaaacaggaggtcatggagaagaaagtgaccgagtaccaggagtgccagcgccgcttcaaggatgcacagaaactgatgaatgaggcaaagtctgaactgaatcaggtgatgaagctcaccatcgaggactggagggcgaacaaccgccagttgaatctaccgttcacagctgaagaaatgaccagggaaacggaaaaggtcaccggagaataagaaccaaaagattgccaacttttaaaacgaacagattatggaaacaaagattattgcaagagtgaacaatgtagatatagtatctacgagtgacgaacaaatggtacccatccgccctatctgcgaggcgttgggcattgcttacgagagacagacgaccaagataaaagaacatccgattctctcttcaactgttaccctgagggtaatggttgccgccgatggaaaacagcgagaaatgttgtgccttccattggaatttatcttcggttggctttttacaataaatccggccaatgtaaacgaagatgcaaaacctacgttaataaaataccagcacgaatgttatcatgccctgttcctgcatttcaccgcccgtgcccaatttgtagaacaaaagcaaattgagatagaccgccaactttcgattgtagatgatgccaaagaacactttcgcactgcaaagaatatactttcggaggccgaggccaaactaaaacaattgcgttcattgacaatgaatgattacgatattgagagtaggcaattgaaaatagatttctaaaaaataatccgggcagaatgccgcactattcaaaaataatcgctatgtttgcaatgtctaacatacatattctcacaaatgcgggcagcaagcttgcattttcggtgcaggcattttttatgcccggacatattgtgtaccatatatggtatccgtgtacccccgtgtggagcgttaatgcgcccacagcatttgtgagatgtgttagacaacgggaaaggcacggatactttcatttaaaaaacttattgtcatgtctaacaacaatgcaaaagtttccatcactgctcacaacagtttcggaacgtccgcccacgaaacgggcatcaacatctccacactcaccccttacgagtatttccacagtatgggaattgatttgcaaggtttctccatccatattcttcgcaagcgccgtaagaacggtgttgccatcaccggtgtgttcaatatcagtggcatctactatacggtcggtgctgaagactatgagcacttgctggtcgatttgctggaacgataccggaagaaacgtgcttaccataagaggtgccaggaacggaaacgtgagcggaacatgctttcgttcatcaaccgttatccggatgccatggtacttccggcatacttttcttgacttgcatctttcacatcaactttatgctttattcccggtggccgccccatcgggaataaatgcttttttatattctgatttacggacatttcgttcggtttcatcctcctggtatcttatgatacttccctactccatcccccggaccccctggaataaaaagataagcaatatagagggagttttgaaaagaaaatatttcaaaagaggcgtccaacagtccaacagtccaacaagagaaagaattttaaaatgtaactctctgttgtatagtagtatatattttctatttaatcatatatatatactacaatggcgttgtcttgttggacgctgttggacgtgttggattgccatttttcaaccatccaactggctccgtccaacaaaaacggcaaaaaatgcggcttgttggacgtgttggacgtcctccaacagtattttctttatagtaaatttgtataactaaataataatcagtaactttaataatgctgttggactgtaggacagttggaagcaaaaataaacaaaaacggtttcaaaaaatttttttaaggaaatgagcatgattacgacgagtatttcaataacaccttacctggctgaatatctgcgtggaaagtacaacaacggtgcggatgaacctttccgtattcctgacaatacggacttgtaccatgtgatatggacgctgatgtcgcggcgtcatcagaaccagtctcccatagatgacggcaatctgactatcatactcccggagaggcgtatcggtaaggatccggaaatatacaactatctgtctccacggtcggccaaaatcatagaaacggaaatacgcaggatgttcaaccgggaacttcatacggcaatggacgagaacgacttgaacggacatgagttgaacaatctcgatatcgttcacaatttcctatgtgcgtattgcatagacagcatcagtgaggatgcgttgctgaagaacttctatcggtggcgggagaacatccgcaagcggaaaaaacgccgcgaatataaaaagaagttaaaaaacggctaaaaaatcaccgaccgaactatgcgttttgtcccaaaatggcggacaaaatgtcctatgtatggcgaacttgttgaattacaaataaatatcctaatatgaaagaactttccattcagattaaagtctatccggtgaccagcatgcgccaggatgcctatcggttcatggccgatgagtttgagtttactccggtaccggaatcctcagaggcgggccgctgtttcaattgcaataaagatataagcataagccttcctccatccggagtgatgaaagacttcctggctggcaggttctgcattgtcgagttcactgacaccaggcaccggagtttccggatcggggacaaaaaaatacccgccattgtctcgatatcccccaatctgaattcggcaactctgaaaattgaatgcaaaatgctcagttccccgctattgtagcgtccttcacccctttctgcaggctgcctatcttcgctgaaaagatacgcaatgaacagaacttatctacgccagcttcttactttaaatatacaccggcttcttatcacggcagagggcttgtcttctgccatgatagaggcttttccattggtgcccgctgacagtctgcagccgacatcctttttcttcaatgaaaatcctcccacatataaagagacatcgaaaaaggccctttcacttcttcagcaggaaatgaaggcccgttcagaactccagggtataaccgtcaccgatgacttctcttctgacgaacttcctgaaggcagtatcgcctatcaccgtatctggggattcatcacctcagattgtcagtggtatttctcctccaagcagttcgaacgggacctgcttgcggcagaagccaatccggccataacctgccatttcctgcatgtgaactctccgggaggggaagcatggtatatggacagactcagtgagacgatgcgctcactcggcaagccagtcatgacattggtggagcagtgcaactgttcggccagctattatataacctgccattccagtttcattgccgcactcacggcctatgataccatcggctgcataggaaccatgatttccacttgtaactatgacggatggttcgaaaggatgggtctcaaactcatccaggccaaagccacgaaatcagatctgaagaataaaaagacggatgacttgctcagagggaaaccggaacagtacatcaaagaagaactggatccacccaatgaacagttccttgccgccgttcttgcgtccagaccgcaactgggcagcctgccggaagacgatccggtattccgtggtgaaacgttcgatactccgcatgccatcgataaagggctggttgacgcctccatgacttttcccgaagctgtggtcaaggctgtagagctcggtcgcagctatatggagattgagaatataaaaagaagtgctctcaactatttataacttaacttttgtttatcatgaatttaaaggaaagaattcagaccgtcctgcagaaactgaatctgctggacaaagcgaaagccaatcaactgacccaggaagaatggggacagatagtcaactcctataatcaggagtaccagtctatccttcaggatgacttggctgcggaccaggcggcgcaacggcaaacggttgccgtcacccaggaacagattgaccaggtacagtccattcttggaagtatcgtcaatccggtacaaaccaattcaacaaccacggaagaggaaaatagtgggaatggaccggtgcagaccatttcacagccagccaacggtgaaggcctggttcaactggccaccgctgtgcagagcctggttgacaatatgaacaaccgcgcggaggatgatatcccttcccggacagtgacagccgcttccatcatgttcacgggaccggcagaccgttcccggtatcttttcggtatcgaaaaccagatgttctccatgtccgaacgttggaacaaaattgctgtcaatccggcctccgcttcttcttacggtccatggaatgaagagattgaaggggccgctttccgtcgccaggccgttactttctcccgttcactgcagcagcgttacgattatctgcacagaaacggcatgcttgacgccaaacgtctggcagccggagaattcagtacgaactacgaaggggtggatacagccggtgtgggcaaccagtatgtggttctgcgtcaggactatttgattgcccgtgtactctcagtccgcgacctcacgcagtattttcccgtccgctatggaattcaagaccatgacctcgtgttcaatgccttcttctccgaagtttcccaagcttaccagcagggtgaaatctggaagggtgacatgaagcttgagaacgagatgggtcatgtggatgatgcgatgatcaagctcaagttcggtccgatgaaagaactggagcgcatgtacatcgcttatctgaacaaggaaggctccgatcctatcaagtggaccatgatcgagttctgcatcctaaactcattggaaactgcgcaggtggagcagaacaaacgccgtatgcggggtatctatgtcaagccggaaacgggtgtcgcaggcagttacttgaacgcatcgaccggaatcatatacacactggtccgctacatgcatgagtttaagattcttccccatgacgatgagtcctatcgcagctacacggcttccaacatgttggattccgttcaggagtttgtcggcgatgtggtggcatcctgcacagaagacatggatcttgaccgccacgtcctctatctgaataagacccatcttccctggtggattaagaatgtccgcgccaaatatggaaaggacattgatttttccggtccggacagttaccgcaatgtggtacctgacacaaatatgcgtatcatctggttgccttacctcggtcagcttcccctcatgttcatggatgttccgggcaacctccagttcctggaattcgtaccgggcgagatgctctctatcaaggtgaaagaggacatggaactggtaaaggcatggtccacctggaaagaaggcaccgccgcttcgttcaccggccgccgttttgacagcctggaaaaactgaaggccaacaattacgaatggcagcagatcttcataaacaaacctaccgtcgatatggcagcggacgcgaccactgtcgatgcttcaaagggattctggcagataacagcggccaacactggagccaaagcgattacggatattacgaatgccaaagccggtgtagcctacatcattgaatgtggcagcacggagaatgccactaccatcgccaagtcggacaagtttgccgacattacggaagcttatactccgaccaaagagggtgactatataatggtaatcctgaacagtaagggtaacttcctggaactggaacgtcaggtaggcggtgtacgcaaggtgaacgctgcactccagcccaacattcctggagtcagataattggttgtctataagaacagattgttttcaggtagcgcggggcgggtccacttaagcccgctccgttttttataacttaaaaactaaaattgtatgaaagcaaaaagaatttcaaatcctttccgtaaagggaaccaggctgcccgtaagatgcaggtccggtttttcctttcgctgatggtgcttctggcactcgtgtttattcttgatatggtcatgtctcccggttctgtgctgggaatttacggattttccggtaccacactggccgccatgatggtcatcggtgacgtggacgatgtatccgaccgtaagacgcacggctcgaatatagcctacaagatttacctggtggatgtcgaccagataaattccgatgtaccctttccgcttccaaaccagcagcgtgagataagcaccatcccgatgaaagccggacaatacatgaagtactttgcggcgcacgatattcccacctacacttcaaccggtgagaaaggtgacattaccaccagcggaaccaacacttttgttgccgtcatgggcggcatgcgtgaccagctgctcgatttcattgaacagcatgccggaggcaagttcatcatccttttcaaggaagtgggcgatgcgcagtggtacatcctcggcaactatgaccgtccgatggtactctcctccttcgagtccaaaaatgacaaggacgggcgttatgtaacctataccttcacacgtacaagcattgaccagtactacaagtatacgggcgatattgtccgtgctccggcagctgctcacacggctggcgcaacggcacttgccattaaatccaccaacaaccgttataccatccccgatggcaatgaaggcacatacgccatttccactgtcagcggattgacagccaatgataagggacgttacatcacacttgagggtaccggtaccgacaaggcggccaccattgccgacggcaacagctttgtgcttgaggatggagctacctggacagccaaagcgggttcttccatcaccttcatggtgcttgatgcctctacacttatcgaggtatccggcagccgtgtgcagacagcttagtaaaaaacacctcttacaagtcagcagaattcccttataggcagcgtgttggcttgtaagacttaaatctgtatgttatgtatagtttcaaagaaaagaagacacattttgtggctctccggaatccggatgtggcacaatatgaccttgagttactggctaaagaagttcctggatttccgcagcttgccacattctcacgcaatcccaaacgttatgccgatgatatcctttatgcactgttagattgtgctacacgtgagaagatacgtgagtatcgccgggctatgatcgcaaaagaggcagaagatgccggagaaaagaaaacagaagcccctgctgcggaaaaaccggccgaaaaaaaacagcaaatgcccaaaggggaaacaacacatgctgaaggaaccggtccatatgacgacattgaaaagcctgaaacagttccggctgacaactcggcagaagagttgaaacaagcgcttgatgaagcggaagcccgtgctgaagaagccgaacagcgtgccgatgaagcggaggaagccagggatgaagcggaagcccgtacccaggagactgagcaggcgctggaagaagagaaaaaaaaagagccggccaaggttccggtaaagtccaaaagcaagaggaatacccgcaaatcgactgggacaacctcttcgacccgcaagtccaaatagccacactcatctacaacgaccgcgtggtcacttggaaacagatgaagcagctcgacgaaagtctggaaagaaaaccgcagaagcgtgacatcatggacatggtggaactgcgtatccgtaatctccaggcattcgatgagctgcaatcgttcaacgacactgggaagttcctctacattcatccgctcatagcccaccagtcagagagagcacaactggagaagctgctgcggacggacccgcaggagttcctgcgcctgcataagaatgtgacggacaatatccgcagatacgagtgttacctgaaacgcgctgacaggcaaaacaagcgcacccaagacaaggaaaatctccgacgtcaccgtgaacgggaatcactgttcaaagcaatattgcaaaaattcaattcgaagtaaaatggaaaagctgatagaagtatttaatttgggtggtttgcctactgccccgctggattcgttcttggagcttcaggaagacttcaagaagtctgatcctgacaaattatcgaaactgcagatgcttatcatcacccgtggtttcaagtatgcattcaaagcctggcaggatccggatggaaagctctggattatcgatgcccatcagagacggaaggcactgcttgcattgcgcaagtccgggtttacaataccggaaataccttatgaacccatttttgcggcagacaagaaagaagcggtagaggaaatcgcagcctataattccgagtttgccaccaggaatccggataccctgctgttcaaaaaatataatatagattctgacaccctgcagcgcttcaacctgggttatgaggtcaagaccactgatttcgggcaggtttcccccctttttgcccaagaacatgagtcggaaaatgtgcaggaagatgccattgattttaatgttcctgcatctgaaaatactgtaattgccagacccggagatatatggttgctcggtaaccatcgtctgatgtgtggcgattgccgttccaaatcggacatcacggcgctgatgaacgggcagcatgcggacttgtgcgtcacagacccaccgtacaacgtgaactatgaaggcggtacagaggaggaactcaccatccagaacgattccatggaaaacgacttgttcgccacctttctcaagcaggtgttctctgtcatgttcgccgtactcaagccgggaggatcctactatatattccatgcggacagtgaaggcgagaatttccgggcttctctcaggaaagcgggattcaagattgcacaatgctgcatctgggtaaagaatactatggtgatgggacgccaggattatcaatggcagcatgaaccttgtctctatggctggaaaccgggtgccggacatcaatggaattccgaccgtaagcagactaccgtctggaatttcgacaagccgcagcgcaatgccatacatccgacaatgaagcccatagcccttatggcatatccaatatccaactccagcactcccggtcagatagtcctcgacatcttctccggatccggttctacactcatggcatgccagcagatagaccgtatctgtcatgctatggagatagacccaaaatatgttacagccaccattcaccggtaccgcgccatgttccctgagcagcccgtccagttaatccggaatggagaaattctttctgttacagatacccaatccttgttgaaatgaaaaaggaactcactctaacttcagacactgataaagccgtcctgataggcgatgaatatgtatcccaagtgcgtactttcggtgctttgggatacactccccaccgtatatgtacgcttctcggcctgcgtggaaaggaaaggacggcactgacagtccgcttgttgatgcccggagatgtatattacgacgcctaccgtaacggttgtgccctgggagaatacaatatcgatgccgaacttgccaagaaagccgagaccggtgatgtgtcggccattgagaccttggaaacacgtaagcaggaacggacagtcaaagacttaagaaaccaactctttggaatatgaccagactcgacacccttgataagatacatccggacttgatatccgcattcctcaccaccgggaagtgtgatggcattcctgccgatgtgcagttattcctcaagcagctgcaatgggcggcggagatttacgaatacgagcgtaacatcacccgtgccgccaagcagctgcgccagcgcatcaatgcccagcagcagattaatgtggatgaacgtacatgtaaggcacgcatttatgcggccatcaattacttcaatatcgacaacaatgtgtccatcaaggtgtgggagtccaactatgccgacaagtacgaggatcttgccaaactatgtgcggctgccggtgactacaagacccagggcaagtgctatgccgccgccctggagtgccgtcgccgtgccgccgagattgctgaagccgaccgtaacctggggatcgtcttcctgatatctcccgaacttactccggaagacctgggatacagcaaggcctccctgaaggagattgcctccaagcacaataaagggttctatctgaacctgatagagaaccttcccatcgagaaagctgagaagaagcgtctgctgcgcgatgcggatattgaggaagctgaatacgaagaacttaatgaagagtaagatggaaactgatattgaaaccacttcccagtttgaggaatactacatgaaccagatgcagatactggtcaatgtcatcgatgccaacaacatatttgccgaagtggcgcgtgcaggtggcaagacggaaggtatcaccggcccacgtatcatccgtgtggccaatgacatgccaggcgagctgtcgtttctggtacataagacctacgttgccctgatgacgaacgtatggcccaaccttcaggcttatttctccagggaagtcaccgtaggtgggaaggtacgttccatgctggagtatggcatcgattatgtggtgggcgaaaataagctcccttctcatttccgcaagccccgatatcccatatcctaccccaaacacagtgtcgttttccgggacggccatcacatccagttggtaagctcggaccagccggagtccgttgccggacgctctgccgtccacgccatcattgaagagatgaaacataacaaaggggagaaattgaaaacccgcttgttcccttccctccgtggtgccagtgccgaaatacgccggtcaccttattaccaaggaatcacgggcgtatccgataccgcgcgtgtggacctcggcgaagatgactggttcgaggaatatgagaaaaatatggatacgaaactgatggaggaaatatctacagttgcgcttcatgtaaatgcagctatctatcagaaatacaaacttataaattcccaacgggaaactacaaatcccgttacccttgaacgtatccgtcttgaaatcatcagacaggatcgcatcatatccttatggcagccccgcctggcggacatgcgccgtaacgccacgttgtacgtccgtgccagttccttctgcaacaaggatattctcggtccgaagttcttcaagacgcagcttgagaccttggatatggacgaattcctcacttccatctgcgctatccgccataaggaggttatcaataagttcttcgccaactacaacaaggagaaacatcagtatgcagacagctatatttatgaatccattctacgacttgacctgcgggaacattttctactcacagcccgttatctgaggcactacaacaagcgtgacgagctactggtaggatatgaccctggccacttttccagccttgttgtcgggcaggaaaaggaatacggccgccagctccgcattataaaggaactctattgctgctacccggatggacagcccgaactcgcccgtcagttctatgaatttttcggtgctgattccctgaataagcgtatcattctctaccctgaccgtgccgggaacaaacgccgcgaagaattggagcagattaccaccgacagccgtgccctgaagcgtgagctggaaagttatggctttgaggtggaactgatgaacgaagggcaggccaccgtatatcattggcaacagttcaagttattgcttcttatgtttggaggccggagcaatgccttgccggaaattttgatagacgagaacgagtgcaggaacctttgcagtgccattatgctgtcaccgttgaaaaaaacggaaggtcgcatcgagctggacaaatcatcggaaaagaaagtgcctctcaagaaccaggccggactgacaacgcagcttcccagtgccctgatttatcttcttttcgggcgttatggaaacaaagtgttgagtgaattatcgtccatgccggacaatttacctgataatttggctatatagcggctgtttttcactataaaaatagtcagtatagatacaataatggtatcgtttgacattaaaacaaacgctttttgtttggaaaccaaacttttatgcttttgaaaaaggaaagcgttttcttcgtgaggcgctgttcagcacgcaccgctgagttttggaattgcaaggcatcctccggcattcctcggaaatatgacggagggcgcttctcgtcctttttcccacagcagaatcctgctactttcgggcatggaaatgacaatgaccggtattcaagcgatgcaatgggccaaagagatatcaaaactgcctgacggctgctttaccattgccttcttcccgtgttccaggcataaaggggaggcatcagccacattgacagttaaagaaggatgcagatggcgtactcaactgcctgaagaaagattcagtatagacagtgacaacttctttctgtttacagacgcagacggggaacccaagatgtgctaccgtattctcatcaggtacatgggctttcctcaagatggtttcaaacttcataaaatagattggttatgagtaaaagcaatctcaaaatggtaggcaacttcggttgctatcttgacgatgacaatgtaatatccttccagattggagacaggccaatggcttcagtcctggaaccggacccgatgttccccttgagtggaggaagtcttccggatacgcagtggcagagcatccagggattccaggtgtgcagccgtggcttcaacaacatgaaatgcgaggaaatcgcgtccgacataaagaagaaccggcttctgccgagattgattaccaagcaggtcaacatgctgtatggtcatgggcttgccgtgtacaagccggcaatcgtggacgggaaacttctgaaacagtgggttgactgtccggaaatcatggactggctcaacagttgggaacagcgcggtcttgaatcgggttataaggaagtggccaagtcaatcatcaagaactactactatttcagggactgtttcgtaaagtggcgcttcacaaagggaaaagcaagagggacgatgcccgttgccggccttgaatccatggagaacaaacattgccggctggccaccaccaagaaggatgtggcgacagatgttgtctactaccgggatttccgctacattgccgtagggcgttgggggtatggcacttccactttccgcatctatccgaagttttccttttcggagcttgccaattacagattcgcggccatttcccatcaccgggaaaaatccgtggatgagttctacggtgtaaacgaaacccatgccggtaccaggtcctacatcaagggttccaacgatacggctgattatatcaactcctttttacgtaattcgcttgccgccaagatacacattgtcatccccaatgcctggcttgagtccaagaggatccagataaccaaactctgcgacgagaataaacggcgcaagaaaaacaatgaggaagaactgatgtacaatggcatcgtgattggttcggaattcaaggaatccaccctgataaagtatctgcagtctgaactgcgcaagatctcccgctatctgtccggtgcagacaaccagggtaaggcgtatgcgacaatcagcttcaagaacagccagggcgaagaggaacgctggaagatagagacggttgatttgaaatacaaggaatatatcgatgccttgatatcctatgacaaacgcgccgatgaggtgctgctgtcaagcgtgggacttgactcctccatatccagtgtcagcaaggacggggtcatatccaaatcaggagccgatgcgtattacaactatctgatatacatcatgtcactgacttcggaagacgaaatctgctccgaaccgttcaatatggccatacagataaactttccccatttatacagccaggggtaccgtcttggattctatcgcgaagtcccggcacgccaggaagatgtttcacctcaaaacagactaaatcagcaacagtcatgagaatattggaagaactgtttaccaccatttcggaatttcggaagtatgctccctatgcagagagcaatgtcactttcgaccagctcaattcgtctgccatttctgcgaaaaagcagatggttatcatccttaccaaagatgtctacaccgatctgacggcagacgagggcgaactgaaggaggccctgcgtcttgctatggccaatcttaccatggccaaacagctcatttttgatgttgtatccaagcgtaaggatgatgtcgatatatacaagcatgagcaggaaagcatgcgcaggtcgtatatcgagaactattataatgccatggatactgtcatccagttgcttgacaacagtcagaccgtgccctcctggaaagaaacgagatacaaaaagatgcttgatgttcttaaaataaagagtacggaggagttcgacatgctgtatacgatagacatgtcctatctgttctttttccggaccataccgatccagagcgaagcgctggatgacgggatatcggcctattttgaacgggcagagaaaaaggaggaggtattgcgcccactcaaacgatgcctcgccaagcagaccatagccattgccctgcggagatttgacattatagagtttccaccgacaataagaagtctgtttgacgagtctaaggcaagcaggtctgggaaggatgagcaggcccgcatgcttgagttgtccgcttctctgcttgaagaggtgaagcgggaactggccaatatagatctgcttttgtcaacggacagttccggctctgtagatacgaacacatcctttaaccgtccggacgacataataatgctgatgccatgttgacaatagattttatagcaaaaggaatgcaatacagcatccccaattcctgggatggattaactccttatcacttccaaacactcatgcgtgatatacaaaggtttgcggagggaaaaatatccgtcggcatggtccgtgcgaattatgtttgccggattatgggatggaatcttcaaaaaataaggaatacggatggatgggcaaatgtggcctggcttgcagagcaggtgacatttccgttcacgattgtctatccggataatgatgcagcactccaggaattggattctgaaacatacagactctgtaagaagataccaccacaccggttgcatggaataaccatatccaggtatctggacagactggactacaaatatgcagttgactcatgtttctgcaaacaactggttccggcgatacatcttgaagatgaaactttttttgcctataatatagaaaccatgttcaaccgtcttacttgctcgcttacggcactccagttcattgaggcacgtggtctccttggatgtccgaaagagcagcttccgttattggccgctatcctttactatccggaccggtattcatctgccggagcgcataagttggcacagaagttcactgggctgccgatggatgagcttattcccatagccttcaattttcaggccttcatcaattatctgtttaccaaaactgagttcaagttgcttacagaacttgaggagaccaaagtttctgccatttccacgggtgcacttgagtctctgtacaacttgagttcagacgggtttggggatattgaaaccatcgaacacatgaatgtcatccagtatttgaccatcctccggaaaaaaattattgatacggtgcgcagcctgcatgcggccaaaatggataaagcggatattgcgagagaaaccagacttccaattcacataataaatgaaatcctatgatacttgatttactcagatattttgcccgttttccccaaaaggaaggggttgtctccatgttcgccaacggctcaagtgactttgtccaatatgcggaactgcttgggcatgtcaaaaaactcccggaaccgataatgcccgaacttgagaatcttgttttcgggcagtcatacgattacgtaaagaagcgcgtcgataatattaccggcaactatctgttcgtggatttcggagaattcacatcaagccgtgacacacacaactccattcttgacagccagaaacttgcagctaccatagccatgaaagtttcggattccgcagacatggttgagacggccattgcctcggaaatgaccttgtctctccttgcggcacttcggaaaaggcttattctcgattcacggtctgaggatttgccatggcttgataagatatcggagaatcatgacattatcccttttgtctcatccgaattcaaatccataggttggacactcatgttcagttctgcagcaaccgatttgttcaatgtcaaaccatcccttagtgagtagcaaatatcgggccattaaatggttcagaaactttttgttcatgttgtttatttccatcctggctgtgggctgtcgaagttcgcggtcaggagctactcctgattactcttttccgtcatccctaccacgagaaataatcatttttttactcaagctaaacaaagctaatacactgataataaacaagatattactacgttatgcgcgttaatagtgttaccttagctgtacgaaaaataaaggataaaacattatgaacgaacaagttacaaacattcttaaccagagcataacaaagacggcaaagatacagcagctccttcttttaggtctgacccgccgccaggtagccgatttggtaacaaacggaaattacggtttcgtgcagaacgtatataagaaaatgctggaagccggaagattcggccagcaaccggccatcgcagcctgccccgaattggactatactttcaacagacgtttcggcatcgagatagaggcatataactgcgaaaagggagttcttgcccgtgaacttcgtgaggccggaattgcagttgcagtggaaggttacaaccataacacccgcgaccattggaagctggttacagacagaagtcttagagggaacgatactttcgagctggtaagcccgatacttgaaggggaagccggattgcaggaacttcagaaggtatgctgggtgctcgattattgcaatgtgaaggtgaacgacagctgcggccttcatatacacatggacgctgcagactttaccattgaaacctggcgcaaccttgcaataacttaccgccgcctcgaaccggtaatcgactcctttatgccgggtacccgccggaacaacagatattgcaaatgccttaccggaatttcagaacgcagcataacggaggcagagaacatcatgcagctacgttcagcctttggaaacgaccgctaccacaaattgaaccttgaggcttacgcacgccaccgcactgttgaatttcgccagcattcgggtaccaccaatttcacaaagatggaaaattggatacggtttgccgccaacatgattacctttgcaaaacatggcatggtgaattcgggatgcccgctttcaaatatcccctttctgacagccgaccaaaaagtatttttcaaattgagaaccaaaaaattagcataatatgatgacaacttacactttgcaggatggcggtataattgccgcctcctgccctgcagactttgtaaccaaactccgtgaaagcagccgtttcgacagtgaatgtaccgaccaggaatatatgtaccatttcgccgaccgtttccatgaccagacggggcatgtagtccgagctgataccccggagcattttttggaggatttgctttccaacgggtatatgaaagtagaataatccccctccaaacaaaagaaggcttccaacttgtgtgaaagccttctttatattgatgtgggcagtagaacgaaaaatccccgtagcggttcatactacggggataagttgtcataaaacgtctctcaagatatggagagtgaacctaattgtttgcttatatcctggagggcaaagttgaatgtctccaaatcctttttgctgagcgtataaactttacccctaactttgctgccattgatacgttggctaagccatgcggtacttttaccgaaatatttcttggcaatgtatcccaatggaatgatttccgtgtagggagctatttgctgcttcaatgtgatatagttgttcaattcttcagcttctgatgaaacctccttgtagccattgattaggaaatcggctattgcatcaacatctttctgatctgtgtatttactggttatttcatcagagagagcaacatatttctccatggcatccggtgtgccggagtgagcgatttcatgcaatttcttcaaatcatctttaagtgccataagcttattgttttgtgctccccttatggggagcttgtttaacttcatttttccaattctttcaaaaccttttctaaaagtgctatctgtttgtctgtttccagttttgcatccaagagttcatccatcttctgcctactcatttggtttcctgcattcttgaaagtgtgttcatacattttagataacaattttaactgggtaagctttgcaaccagttgcatttttgtttctttttccatatctctttgttttaatgacaatgcaaatatacataaatatttctttatgcacaaattccataaagaaaattttatgtatttcttctttattgaacaaaaatgcattttctgcacatgaaaattttaacatgtgcagaaatggggtatatttgcacttataggaagcctatcaggagtcctattatcagacccgataaaaagcatatcatgatgatgattggaagccagctgacagattctttcaataagttgaaatccgtacatactttattgattctattctccaactgagttaatttgtattggtcttgcataacttctttctttttccataaaaataacctttttcttttgccattccaaaaacttttgccatatttgcaatgctgtaacagttggttgaactgttttttcaaccccgaccggacaaacggctatttgtccaaatacgaatttgggctttttttatgcccataggtttgctcccgacatgaatgtcgccagcaaattcatatacgaacaagaagacattgcgtaaagtatgcatatatacttatacggctatcattcccgaacatttattccaacgcttcggcggggttgaatcaactgttacagcaacgggtttggtagccgtttttttttctgccatttgctgtaacagttattcgtatatgaaaaatcaaattcccggcactctcaacgtgcctgcctccggcatccccaccgtgggcgaatccgttaacgctcttaccgagcaagtcaataacctccagcgccgttactaccgtgctttggctcccgactgcgaagtcaagaccgaagcagaccgctggtacttccgcgccatcgtatgggcatgtgccgggatagtgttcccaccattggttgtggtcactgcattgtgtgtttataaggcaaagaagtgccagaaaggaggtgccaaatgaaccgtatcaagtctatagcacaaaaagatatttatgttcaagccgaacgtctttgtacaggaactgaaacaagtgagtctaaatattgccttgcttattatggcaactatgtgatgtgcgacatctctgcggaggatgcccgtgaaatcattgcctgcctgcagcatgcgcttgatgttaatgagaaaggaggacaaaatgaaaaataaagagcaagaacagaaaattaccgatatcagtatccatatagcatccttgtccgcatcgttcaaacctgccccggatgcacgccatgccacccattggttcactacggatgaagtctacgacgccattcgtcgcattgatcctggagcgcatattagtaaggagcaggttcatcaagccatgcttgatgccggttataaataccagaaccgtcctggttcatcaggactggacttccggtggatgctccaagcgagaaactaaatactactgtcatatagggggtaattgttcgtgatgaatagttgccccttcgtttttatgtcctttccgtaccccctcccctattctatcttcgctggaaataacagtaaatatgattacagaccagcttgtcagagaacgttttgtccatgatataatgtctcaaggcatcaaccttatttatgaaacacaagaaaaagttgtgcgtacatatctcaactcacggtctggtgacctggtggcacatcttcagaaacgtccgttcattgcccaggaatcagatacggaacaagcctattatctgcgtatattcccatatctccgcttccttgacatccattaccgccgtggagccagtgaccgtatttcccgtcatattcgccgtaatcttgctctttataaccgggtggtctggggagtgctgtatcatgagacattcccggaaataaagtacggtttcacggaagaagttcgtaccaatattcgcaaggaactggagcaggcacttcaatacgaaaatacttcaaattggtaacattatggcaaaaaagcatttatccgaagacgaaatcaaactcataatctcaggtgacagttccaagcttcaggaagagctgcatacactgaccaaggaaaccaaggctttgaaaaaggaagaggccgaacgccgcaaggctatggtggagctcgaagcccaaggcaaaaagaacacgaaagactatcagaaccttgcgaaagagtgcaaagactatactgccaaaatttccaaaaacaatgagaaaataagtctgctgacccgtaacttgaaagtcaacgatctcaccatgagacagctcaagaaagaagctaaggagctttccgctgctttggatgatatgactgaatctgcgaatccggaagaatatgccaagctcaatacccgtctcagagaagtccgtgcccgtatgagcgagttacgcagcgcaggtaacaacatgaacaatgagttcggcaacagcgtgaattggatgtccaagttaaaaatggcagccaaggctttcattgccgttaaggttgtcggatggcttaaggatgtccatagccaggcatacgagacacgcaaggaattcgccaaatacgaggcagtccttcggaatactttccagtcgcagaagaaggccaatgatgccatgaagatgcttcagcaattggcagcagacaccccatcgtccttgcaggaatggactgaagcatatatcaagcttgttaatcgtggggtcaagcctaccagccaggagcttgtcaacatgggagaccttgccgcttcccaaggaaagtccgtcgatcagctcattgaggctatacttgatgcgatgaccggggagaacgaacgtctgaaggagttcggtatcaaggcttccaaatccggggagactacaaagttctctttccggggagtgactaccgaagtgcgcaattctgaggatgccatcaaggattatcttctttctctcggtcgtgtcgacggcattgccggttccatggccgtgcagatgcaggaacttgaaggaatccagtccaaccttggagacacaatggatgcctttttcaataaagtggggaaaaagctggagccgttctggaaatccatgttgaagtatgccaatggattcttcactaaacttggggaaatgttcaccacttatacggaaacctacgagaaccatttcgacaagatggtgcagcttgagagcgcattgccgggactgttgaaccggtacgaggaactgaccggcaagtcctcccgttccgctgaggaacagaaaaagttggccaatgtcatagcccagataaggaacatggtacctggcgcagcgacagcattcgaccagtacgggaatgccatcgaaatttcaggcgaaaaggtggaggaattccttaagaaacaaagggcgctgctaaagtttgagaatcagaaagccatccgggaaacaacagagcaattggaagaataccgccaggcatataagaatctgttggaacagcagaaacaaggtggaaggactgttttccagagcaacggtatgtttgccgcaccgacagcatacatcaatacggaagctcttccgcaaatagagcaggatataaaaaagtatggtgacctcattctgggtgccgaagagaaattgaaacaactgaacggccagactattgaagaaaccgtcaagaaccagcagaagcttgcagaagtacgccagaacttcaacaagatggagaaggttcagttgcaagcctggataaagaataataaggatgcagccggtgagtatgtagaaatagcccaggaaatatacaacaaacgtttcccggcagaggactctgacgcgaccaggaagaaggctgaaaaggctgccaaagaagcaaagtcggctgctgaaaaagagcagaaagcaaaagtctctacggagcaggaagccgccaagtctcttgaagcattaagggaggaagaactgcaatcccaacagaaatggtataatgaatcgtttgccgctctttcagcttttctggcatcaggaaaaatgagtaaggaacaaaatgaaatgctggtactcgaacttgaaaaatcgtatgcggaaaataggctcatcatagaacagtcttattatgaggacgccatatccatggccatttccaatgcagaaaccaaggaaaatctcgtccggaagtccaatcaacgtgtcattgatgcggagaaggcggcgaatgccaagcgtgcttcactgcaggaaaagctgaatacacttgtcaaggacttcaaatcagagttcaaggttactacagttgatgaagactatgccgcgcaactcaaggttcttgaggcatcctaccaggcgcgtaaggaaatggctgagaaaaacaatcttgatacgacagaattggacagtgcctaccttagagctaaggaacaacttgaatccgaacatcaacaacgcatccagtccattcgtgaccagtatggcttatctacacagcaggaacggttcaatgcggaactggaacagctcaggctcgcacgtgaacagcagtttctgactgaggaacaatatgagcaagccgtccagaacctcaaacgggacagttataaaaagcagtttgactattattccagtctgttttccggagccattcaagcattgcagcaagcggaaatggaccaggtcgatgcaaaatatgatgcggaaattgaggcagcccaaggtaatacggaagaagtggaacgtctggaaaacgaaaaggcccagaaaaagcttgatatacagaaaaaatatgcggacgtgaattttgcaatcaaggcatcacaaatcatcgcagacacagctgtgtcaatcatgaaagcatatgcagatttgggaccgattgcgggttcaatcgcagcagcccttatgggcgtgaccggagccgcacaattggccagtgccaaagctgaacgggataaaatcaaaaatatgactctttccggcagtaattccggcagttccggtaccggcgcacgcgttgccaccggtcgccagtccggaggcaagattgatgtccgacgcgcccaggatggaaagctctttcccgatgccgactacgaccctgatgcacggggattcattgaccgtcctactgtcatagtaggtgaagggccttccggacaatccaaagaatgggtggccagcaatgcagctgtaagcaaccctaccgtcgcaccgatacttgacatactggacaagtcccagcaggccggtaccataaggacacttgatcttaaccaggcaatccgtgctcgaatggccggttattcatccggtggctccattgatgcccagaaatctgcagtgccggtaccgcctgcgccatcaggaacctctctgcctccaagactgatggaacgcctggccaatgcaatcatccgtattgatgaagaaggcatcccagcatccgtcactctatctgaacttgaacgcaagcaggaattgcggaaccgttcgcgtaaaataggaagcaaataacatttcatcatgaaaatagtacattcttcaggaaaagcctatcaactggcacctgacacgcaaattgaaatcgaacgtccgaatctgttcttcaatgattatggtgagcagtcacttccggtggatctcccggatacagacctgaaccgggaactgaccggttaccccgatatggtggccaaccgtaaaaagccgcagacagacatcacatgcagcatccgagacggtgactactgtgtgaccgcccggcaagccatactcggtgccaagcggaaagagaagataacgacgacattctacatgaacgagggcagtttcctttcgcgcatcgagaaagttgccgtaccggccgttttcggcagcgagaccgtacccggagtagaaaccgtagagcagggtatcaactggtgccgttcgttgctcgacaacaccaatccgcatttcaccctcttccccgtcatcatcgagctggacggggaaaaacgcggagtgaacgtcacctgcgtaatggacgagaatggaaggccgatgcaggtccgtcccagagtcacaaggaaacaaggcttatacaactcatatgcccgtacagagaaggtggacagccgtataatcacacttgattccggttactacattacgcccttcatccgtgccacctacctactggaacgtatcttctcctatttcggctataccttgcaaccgaattttttcaccgagaccgagcctttcaaaagcatggtgttcatcaacaatactgccgatgcgctggtgaacggcaccatcctgctggcccacctggtgcccgactgcctatgctccaccctgctcgaagtcttccgcaagaagttctgttgcgagtttgttccagatgaagtggccaagaccgtccgcatagagtttttcaaagacatgatagccgcacgcaacccgacagacttgacgtcttgtctggccggacaaccggaaatcaattacgagacagcccgtcagctgaagctatcgtcaaagagctccctcagcaatggaagcactcttgacagcaccaccgagctggagcgcaaataccccacggcctactatgacatggcatccggcagatacgtaagaatgggctatggcagggagggcgtcatcagggtagtgtccgacggaaacctgccgttctatgccggagaagaaggactggatgactatgaagtggaggtgcccgacagtcagttctgtttcgacagcctaatgtttttcgtgcagggcactatcaacggaagagaatacgggaattccgtaactgccccctatatcggagaaggaaggatgctcaacagtactatccgggtagcggacgaaagtacgaaaagtgaggaaagtgaggaaacgacaagcgatccctacctgaccgaaacctcccatgaccagaatcccatgctggctttcgccttgagtaacagtaccggactgcccgtcggggcaaaccacgatgccgcgcgtggctactcccttctgtacaacggccctatcggtatctatgaaaaattctggcgagacttcgacaccttgctgcgcaatgccctgcacaaggtaacagttccgctactgatgacgaacacaatgaagcaagccctccccgtctaccggaaagtggtactgggcggttcggaatacctcatcgacgtgctgaagtacactctcggaggcaacaatatgccaatggatacaacgttgctcactacgcagctccaggagcccgtaaccatggccatggacgagagcgaacggatgaagatgcctgcctacaagtggaaggtaaactgtacgctatccgaaatgacggaagacgaatggacagcagcaggcttcgaggcgggcgcgttggtggacatgaccatcgtttatcttgcaccgcccaccgagaaacagtatgccgcaggcggacagtaccacaagcggacggactactacagctatatgtattatccgcgccggggagaaggtgaaatctgttatagaagagtgtccgtttacatgactccccaattgattacagattaaggcggttgatgatgcgttgtcctttctgcatgcaatcaatccacataaattcgcaccaaaaacagaatgtaaaatgaatatcatccaacagcccgacatgctgtcgctctcgatgaacctgaagaatttcatcatcggctcttcccggcagacgacattcactctgaaggccggcgacaaagaactggtgtctcaggtatatgctcctgacgaaaacggagtgatggagatagatatacatgaaattgtacactcgtttttgtcatacagcttgaaagacatcggagaggtatatcagcaaaccaacctggttgccgatttcacagcagtcatcgactccaccgaaatcacctttcgcgttatccgctctggagtggaccgcttgactgactctcccaccaattttctgacacagaatttcctcacctggcaaccgaatgtaaagccggtcacgtattattctccggaattcctgacctactatgctgtggttgccggtacagtcaaactccgcgcatactttactgatgagtctggaactgttaaatctcagagtgattatactgttacagaattgatgccaggtatagcttataccatgcctctacaatactctgtcgttgcgggatggctggaacataaattacctgcatattatgatgtatgggtcgagaacacctccggccagcgtcttacatatatacagcgttactatgctgaggatatgcgctccgagcaggaacagtggatattatttgaaaactctttgggaggtgtcgatacattccgggcatatggtaacactgtattcaatggcgaacacacgcataatattgctgaaattgacgaatttttttcagaataccgtgtagacacagagaggaagtttcaaaaaaacactggttacctgaatggagatgagcgcaaatggctgcttgatttcttcccgtcaaatggcaagtatctgtacgccggtaattatttgcgccggatagtcgtaacagacagcaatgtcagctatacagaccgcgaacttccaagcaattatacgttcacattcaagtatgccgacgctcgtccattactaaatctttcccgaaccgatgtccctacagacgttctcaacattaccgtacctgaagtcggttcttttacagtgccccctcggcttgctgaatttccccatctatcgttatccgggggggcactgtttcctgttcaaaatccgtattcagaaaaatggtcaacaacatctgtggatgccattgcttattttttggcagattttatgtcccgcgtttatggctctggtggtggagtcggtcacaaacaccgtaactatgatttgcttgagttgctttcatatattgagaactatctattggtaaatggtcagaagataaaggccggttacgcggacaaagccggttacgttgaaggaatggaggatatgttccttcgcaaagaccagtctgacggcactaattttctgttgaagttcggcgagtttatcgactctatggtcgcaggcaagggtgccggaatattccctgacggccgtatgcagctgtcccgcctcgaggtccgcgacagccttaccgtccttgagcttatcttcaaccgtctctccgccatggaaagcgactattcattctccgagtccggtaccatcgaaagtgtatcgcagcttgaagacggcacatacagcctgaagatgaagaaacggtgggataacgactttactgcactggcagaaaacgatgttgtatatggtgttgtcaatgaccttgcatcaggtggcggcaagtattatacctcctggctacgtgtcttgcatgttgacatctcggccaatacgatcaacgctgtgatgtaccctgatagcgaggtgccgggtggcaagaattatcctcctgagccgttgatgatattatcacaccgtggcaacccggttgatactgaacggcagggttattggtatctgtcatcccgtgagcattgtatctgcatgcttaacggggtcacaaaacccgtccttgaggaaagcaactattcggtgatcgtcggcaggctgaagcatctgtctctgttcgacaacctgcccatcaactacctgcactcttatatctacgttcggggattggtagcgcaggacatccaccgcatcgacttccaaggcgtattgccccgcatcgccaacgaccgcggcgagtggagcatggagaccgccacgggagcagaaccctaccaagccgaccgcgaggcacagaccgagactgtacgtgtgatgatgtacgataccgtgtggcactacggatgcaagtggatgtgtcttgtttccggcactaccgacgaaccgaagtacggagcagcgggctgggcaatggtcgagggcaatccggatttcagcatcgacattgagagcagcaacggctggtacttcgatgcggagcgttttgcgaccaccctcaccattaccggtgagctgtacaaccgtgacgtgacggctcatatacttgacgctgatgtggagtggacgcgcgacacgggcaacgtcaccgaggacaacgcctgggcggtcgcacacgcggaaaccggcaagtcgctgccgctgacggtcaacgacctcggccccaactatatgaacatgaccgggtgcaagttcatcgcaagggtgctgctgcgtgacgggcagaataattatgagacaatgaattatataactttctaattatgcagactatacagaagaagatagaaattaattatcgccccctccagaccagcggcgggatagaggttgtcggcagcgtgccggacgtgcaggtgtaccaggctgacaaggccgagtacactccggactacacgcttacccccctgacactgttcccccggtgcaatgccaccgacccggatgcggtggtcaaggtgggtgcggtcaacgcgtcattggtcaacatgaagtggtacgagcgcttgaacggtgtacggacattgattacatctgccaacaagagctatgtcattaccgagaccggagccgagaagggtaagatacaagtgaaaaagaataccgttcccggcagtccggtaacactggagttctacgccgagtatgtcgatgcgaagcgtaccggacagacgcacgtctaccgtttcagccgtcttgttcgcgccgtagatggcagcgaagcacagcctaagctgatggtcgactctccgtcggcacttgactggaacccgtgtcgggacattgccaggcaggccatcaccgccagactgcttgtcggtgatatggacgtgacaacgacggacaaatgcaggctcttctattaccgcaagctcgatacgggcgcactggagcagattaccgacggtaacggcgacaatgactgggagttcgtatcacttgccaagaacgtgcttaccatagaccgggactatatcggctacgaacagacctacgtcgtaaaagcatcgtactcgaaggacggtgctccttcatccaagccggacagtgacatagactatgtctccaccaccatccgcagacgtattcccgccatcgagattgactgggagggatttccgcagcaggtggccgacggaaccaagatgatatacccgaaaccggtcatccgtgatacggcagggattgtccccaatccccaggccatccttgagtgcgaatggtacacgaaggcggccggcgcctcctcatacgtgctggccgctgccgggtactcgccctccatcccatgcaccgacggcatgatgctacagctgaaggtgattgacaagggcccgtatgcggcggtggtgacatctgacggcaagtacgtgacggatgacagcggtaagtttatagtggcaaggaaaagggatgtttaaccattaatcgatagcagtatggcattttatatcaaagtgacgagagaggttgcggacaagctgggagtggcaggaatccgcaacagcactgccgacggcaatgtgctgttatggcaggccgatgtggcaggctttcccggcgatacggtattcgaccgggcggcagtagtcgggggcgtgtgcctttccccgcagcaggccaagggtgagatagacggcgtggaagatccggtggaggtcgccactccggagggtttcatggataaagacggggaggaggtgaccgatgagcgtagcgagtaaggtcgggcaggtaatcttttcgcaaaagtctggcgtttacatgccagcgattatgtgcgacaaaggcgacctctatcaagagtatgatggtgaatcgggtgctccgaccaacatagcccccgacttcaccgcgatgaagccgacgctctccttccttctcacctcctcacgggtggctgaggggattgtggtgccctcttccatcaggtggtatttcaatgacgtcgaggtcaagttctcgggcaacgtctccacgaacacgtttggcggcgagacgggtcatttcaagttcattccctacaaggcaggcactacgaactattacgggcttcagatcgtgaagaacctggtgaaggcgtcgtccggtgcgagctgtagcgtcaaggcggtggctacggtgaccgtgggcaacgtgtcggatgaggtgcagttcgtctacagcatccctatcaccaagggtgtgggtaaccagaacgtggtgaccatcgtttccggagatgacaaatactttgccatccgtgagaagggaggcagtgtcgttctcacggcgatggcgcggcgtggagcgtcagagatcacctccggactgacctacaagtggtccaggatggttaacggtgcctggcagacactcgtcgaccagactggcaagagtctgaccgtcacggacagcctggttgacactacgggcatcttcaaggtggaggtgtcgcagggcggcaatctgataggccttgacacgcagacggtgatggacttgtcagacccctacgacatcataactaatcccaatcccgaggatgagacgattacggccggttccggcggttctgtgacctatacgcctatccttgtcaagcggggacagaccacgaaggcaaagaatatgctgttctattttgtctttatggattcggcaggggtcattctcaatccggctacggcgaatgtggctgcggcaagcggtacctgcaccgaagctatgtgccagcaggcaggcggcaatgtttcatggacaatctcaacggcagcatgatatggcaaagaaagcgttggcaagcaagacgggagaagtgaagtatctccagcagggaccggtcggcccgctggtctatccgaccggggagtacgcggcatccgtatcctatacccgtaccccactgtccgcacccatggtgctgtgtgaggggcagtattacgtattgaacaaggagggcaccttcaagaatattaatccgaaaaaggactatgcggccaacggcagcaaggccacctgggtgctgatggacaaggtcaggtattcgttcgtcgagattctgatggcgaacttcgcaaaactggcgagcgccgtattctacgggcagtacatgttctcccagtacggggtgagagcggacggttcggccgtggagacggagggcgggtacaaggacttcaattacagtgatccgatgaatccggcgaacgggttcaggccgaacctgctgattgacttcctgagagggagcctttatgggcggagtgttgacttgcagggtgacattacagccgagacaatgaatctgaaggtttgtacaaattcagacaatgaattacctaatggctctataatactttatccgaagaatttggggcctttaccggaactggaagctggcacttgccaggaaatgaagatgttgtttcctattgcgacaagggttcccctttccgtaactttaaccactgcatctgccaatgtgaggattgcgcccaatggctctatacttgattctgcgtcaagttatgatatagtagatgcttacggatatcatgaattaatcgggtttagatatgccgatggggatattacctattggtgtgtatttaaaaaataaaagagtgtatgaaagtttattataaaagcgaggtggcgaaatggctattgtggtaaggctacagcaccatcacattcatttgattttaaatttacaaaacgagaataaaaacaaaatgttaaaccggttgtcgtttttatccgaaaatgacgaccctcaaaagtacaagggatatgatagagaaagttaacataacagactccaatgtgactgaattgatcagaggaaaactacccattgcaacggaggtgaaaaacggtctgaaacctgccagagacgtacaacaagagaagcgggtatccatgacgtcctccatattattgtttgaatatgatggcacaaatgcattctctgatggtattctatttagtgtacagtcatacggtggggggccggttgccctatatttcctttcaatatatagggcagcagaaatcacaactgccccgaactgtaaattaagcctgataggcggtgtgttgggaccggaaagcacaaggccgagattcaaactctataataccgatataggagcattcaaggtgtttcttgaacgtaaggtatatactgtaggagtgtatgcgaaactattgtcttcctcccatccggcaacatttgaattcatattggaagcggctgacgagagtgaagtgactgctgcgagctacatggaggagtctaaggtgggggaataattccccccactgtagcatttatttccgtttcttgtctttgccgccattgacggatgtttagtttgtgagaaacagattatccgttccggccatctcggataaaacgggtaggtctgttacgttgatatgtctgttaacgatatatatttccatgaagaccactcatctttcccgttggcagtgacacactttcttacaaggataaagtttttccttgcaggaaaatcaatatgtattgtatattcatctatgtacaagaccaagagcacaccatgcgcgccataggaagtccccgtaccgattatggggtccccatgcttatacacaccaggtttcttgaggttatctataacttcttgactgttatatataaaggagcctcttgcacataatatgtcactcaaaaaagaatccaacggctctaaaatgccctctccctgggtgttcagcccacgtatctgagcaattattccgttaggcaaacctctctccacttctgacaactttatcttttccatcatacctttgtacttttgagggtcaaggaatatgacggaaaaaagattgttatgagctctactgtcaatcaagtaaatgatatggacttccagttcgtccattccccgtaaaaattgctgctcctgacttttaaagtatttcccaataaatcggattttagttgaagcctacattccttgtatttaagacaaagaaacataccagaaataccagaaccatctccatttgaattgtagccaaatccggaacctatttcatccaaggaaccttcgacaataccataattcttaaatggaagcaagttgaaaaaatcatttttcttaattttcaacggaacactactttcttctccatagaaaaaatctgcatcatccttaacagataagttgtttaaggcttgacttatgtttaccttctccatcatatcccttgtacttttgagggtcaaaggatagggtaggaaaatggatactccaaaagtctcttatgttttggtattatttattaacgtccaatctttcaaaacctctccattgctacgaatggttttaatatatattcttgcagagttggtaatatataaatgggctgtgtattgaaaccctcttagcgctaataaaattccagtgcccatattatttaaattatcagtagatgaatatacaccggcactgattttactatcgtattcttcatttaatatattcttaccttgttcaaatccattagcttgcataagtcccttgtttgcttctgttgcagcaggcagtttttctctgattaactcaaccacattggcatctgttatattaaccttttctatcatatcccttgtacttttgagggtcagaagataaggcagaaaaagtagaatgaataaattgctctattataggtaaattatattttcctccaatcagtataattaataaaagatgttgttccacttccttctctaatgtatgtccttccaccaccgcttactatctgaatgataaattggctaccagtaacattcccacgatatgagcgttgtacatggatacaaattccataatcaataggtgaattcatggtaagagcaatatgtaaaatacttagtcctgcattacaaattttataagcttcatttaaatctgttacatcggtaataccgatattcttaattggcaacaaagatgatattgtatccttatcaatctttccctggctattttctttttccacgtacacatagtctgcatctgttactatctggcactggttcattacttgacttatgtttaccttctctatcatatcccttgtacttttgagggtcattagaataccctttttggttaggctgttgaataagactaccttcaccgcaaaaatggtttacgcatatattagggttagcactgacaaacaaacagtcgagaaccaaaggttcgaagtccagaaatttgcaacggaaaaaggacttgtaatagataaatgggtgtccgagaaggtttccggtaccaaaattgctaacgatagaaaattaggcccgcttctcaagaggatgaagaaaggcgacactctaatcataacagaaatcagccgattaggaagaaacctgatgggtattatgtcaatgcttcacctctgtatgattaaggagacttgcgttcttactgtcaaggagcgttacgaattaggtaataacatcaacagtaaggtattggcattcgctttcggtctatccgctgagattgaacgtgatttgatcagtcagcgaaccaaggaggcccttgcttacagaaaagccgcaggaatacgacttggtcggaaaaagggggataaaaacacgcattacaagcttacaggaaaagaacctctcattagaactatgctcgaatatggttattcaaaggcagccatatgtcgtaagcttaaatgtaaccctaaaacattggatgaccatttgcggagaatgtcaaaaaaataatgtcctttttgaaggctacatccatatctatctttgcattgacattctgtgtcaatggaaaatctcgaattggcagcatgtttgacataagcttacttacttttgtggttgtctgacaatttgatggttataaataaagcaataaaatgggtatgaatgattgggttatgctggtgaccgcactcggtggcatcgagggcatcaagcagcttattaagtggtggatgtcgcgcaaaaccaatgcgcgtattgaggacgcacatgcggatgtcgaggagttcaaggcattacgggagtacaacgagttcctgcagaagcagctttcggcgaaggaacagcggtttgtggagcagacagaccggctccgtaaggtgcaggatgagttatttacactgaaggaggctaattctgacttgaaactggaactggcactgaaacggtgtgagagaaagaagtgcggtgatagagaaccgcaaaatgggtattaactgaataaggaggaaaattgaaatggcgaatgtgaatcaacttgcaccgtttatcctaaaatgggaaggcggtttcgtgaatgatccggcagaccttggaggtgctacaaatatgggtgtgactatcggtacgtggaagtcatgcggctatgacaaggacggcgacggtgatatagacgtagatgacctgcatctgcttacccgtgaggatgtcgttaaacgggtgctcaagccgcattattgggacagatggaaagctgacgatattaaatcgcaatcagttgctaatatccttgtcgattgggtgtgggcatccggtgcacacggaataaagattcctcaacgtttgcttggtgttactgtggatggaatagtaggtcctaagacacttgctgcggtgaatgccaggaacccgtgtgagttgttcgaccagatcaagattgcacggttcgatttcatcgaggatatatgcaaaaaacgtccggcgaacaataaatttaagagaggttggatgaatcggattaatgatttgagattcgaggaatgaaaaagttaccgtggatattaattgtactgctggcaattgcttgtatagtggtttggttccgtccgcatgagcagcctccggctgaagttcgtgtagagacgaagataaagacggttgtcaaggtagatacgatgcttatctctgcaccgatggcagtgttctggcgtttcgtgccggatgatacgacacggataggtgataccttgcttcatcgccgacaagtagtgtattcagacagttcgtatcgtgctgtggtaagcggatatgttgacccacggctggatagtatgactgtgtatccgagaacggtttatcagacggtgacgaatgatatctatcatccggtggttgtcaagccgaaaaggaagcgctggggattagggttgcaggtaggatatggctatccgggtggtttttatgtcggtggtggggtgagttataatttgtttatgtggtagaaaaaacatacctttgttgctgtagtagttttacttatcattcatttgataagtggccccggcttccgtcggggctttttatacaagaaatgattagttaaaagtattccagtgcctactttcttttatatctaagttgatataagctcagatatgattatctgaaagtaagaacaaataataatagtattagatatgaaacagagaagaaataggtctgagtccaactataaacgtgcaaagattaattcgtggtgcaggcttttagaaaaggattttgattgggattatacgtttttattggaaatagagcgcaagaaaataatagaaatgtatgaatactttaaaaagtgtacgcgttcggataaaatgcctatagtggcaagagacttgcaactttgcattggcctattggatattgtgctcgaaaaagataatttgcagttggaattttcagggatgaagactatgcgtagagatgacggtatgtatgaaatggtagaaagtccgcatataatagcttgtaggaatctatacattaacactaaaaatgcatcaaggttctgcctatttaatttcccgacagatgattatgatattgaaattattcataaagaggaattgagaagatataaggcgtggtatctatataataaaatcagaacttacaagttgttttcttggtgggattaggtaataggcatccatcattcttacatcgtaaggttttgataggtaaagcagtccaataagcgaccttttttctttggcttctctctgctatgatttatctttgcaacaaaaaaatatggcatacaattatgacgaagaaagcgtgaatgccttaatgaaatgggctgagaacgcactattacccaaagaggtgacattaagtgaggcagaacatatttttgatacctccatgtatgttaatgcgaatatctgcgatattaagcagcattatccggatgcattctataacccggctattgaccggttatataggttgaaggagcatatggaagataatatgtaggactgtaggagcgtaggagaccaatattagcctcctacattatttattatctacatatcgggaaaatcctcttgtatcagggagctttttaccgcgaatcttttttgcaagtatctctctgtagtagtaattgatttatgcctgaagtgcttttgtatttcccatgtattaactcctgcattgaccagttttactccaccggtatgtttgaagctgtaaagtttgtatcttttacttaatcccagtttatccctgattctgtcaaatctatatctgaaggtatttttcccaagtctgtgttttcctggctggccgtctcgagagaaaagataccagtcttccggatagttgcctatcttcagcaggtcatcaagaacttcataaagctgccttggcatattgactgtttctgtcagtccgttcttactgatatcctgacggatggtaatggatgctgtctccagattgatgtcacgtatctgcagatacaagcattctttcgggcggattgcacaatagtattcaagctgacataatagcaggagttgcgggtcgtgctctctcatatagccaatcaatatatttcggatcttgtctggaattgggcttgccgcttcgtctcttttctcgccaagattaggtatattggtgaccggattagctacaacaagctttttgtgtagtaagtaatcgaaaaaagtatgcaataactgcttgtatttcaatactgttctgcgactgacatgtccagttccgactatgtgataaaaaaaattgtgtatatgttcttctgatattacacgcacgttcttgtttgccaagcaccccgcttccacccattcacagaagattctcagtttggaacagtaagtctgataggaggaatgcgcaagttcggcttttttcagttggaggaattctgaaatgtgcactctgatgctgacggcacccttgctgttattgccccatctgttgaccatggcctgatacataagctcgtcttgataggtaacatggttttcagcgaacggatcctccccactgttgagcttgtttttgattgtagatatcactttctcggcatgggcacgcctggcactttccgttgccagttccgcaaagccctcataatgccgaaaccgcttcatctccccggtttgtggatccctcaaggaatattccacataccatttttttgttagatctccgccacaatcctttagcttgggcaggataaatacagatttctttcttgccatttttgctgtttttttgaattaagggtgatgatttactaactcaatagacagttaaatagacagttatttttgttggacgcttccatatacaaaaataagtcgttgaaaatcaacgacttattcatttaagtcggggtagcgggattcgaacccacgaccccctgctcccaaagcaggtgcgctaaccggactgcgctacaccccgaatgctttacttctgaaaagcgagtgcaaaggtaaaaacaattctgataccaaccaaatatttaggcaagttttatgcaattaaaattacattttcagatagaaatctttcgttaaagctacatattcaggggtaaactcattgtgattcatctcaatacaaagtttctcttctctacactcttttgcttcaaaaccaaagttcagcaatacccgtctgcacggttttccgggtttggtgaagacttgcacacgatgcaatggaaacaacttatggttccaagctgtatccacaaccgttttttcagcttccgctggaataatgatgcttacgactccttgctcttcaagcaaagatgccgaacgacgaaatagtaaatcgtaattcaaattgcccgcatgccgtgctgtgcacctttgttcgtcaggacatttcaacgcatctataaaatagggaggattggaaatgatgaggtcaaatctgttttccggctgataatctcggaaatcatgacatatgacctctactctaccggcccatggagagtgagatacattttctgtggcttgtccggctgcagctgcatctatttcgattgcagtaatccgggcatgcggattcctttgcgctaactgtaaggctattaatccggtaccggttccaacgtccagtatacgcttcgctttgtctgccggggcccatgccccaagtagtacaccatctgtgccgaccttcatggcgcatttatcatgaaatatggtaaattgtttaaacttaaaagatgatttcggcatgtttatcttctttaattgggttcaaaaataatcaaaacctgcatatttgtcataaaattggcactgtttttgtctttttaaaggatgagaatgtctatttatgaagaaatagcttaactttgcaagcgctttattggcctgccaatatgacataaactaaaaagaaagaaatgaagaaaagaaattacctgagtgatgtcgaagatagaagcggaaacgctttctctgtaattgctgattttgaggggaatgaggaacaattgatggacattgaggtagaagaggttttaccgatattgcctcttcgaaatatggtattgttccctggggtgtttatgccggtatctgtaggaaggaaatcttccctcaaattggtgcgtgaagcagaaaagaaaaattcttatatagctgttgtatgccaaaaggtggctgaaacagagacacctctgcttgaggatttacataccatcggtacagttgccaagatagtacgtgtgcttgaaatgccagaccagacaactaccgtcattctgcaaggctccaaacgtatggaactgaaggagattacggatacgactccttatctgaagggacggatagttacgctgaatgaagaacttccggagaagaatgacaaggaattccatgcattggtagaggcgtgtaaagacttgacagtacgctacatcaagtcatccgatatgtttccgcaggattcggcatttgccatcaagaacattaccaatccaatgtttttggtagactttatctgtacgaacctgccactcaagaaagacgaaaagatagaactgctccgtatcgactctttgcgggcgcgtacttaccgcctgctcgaaattctgaatcgtgaagtgcagcttgccgaaatcaaagaatctatccagatgcgtgcacgcgaggatatagaccagcagcagcgtgagtatttcctgcagcagcagattaaaaccattcaggatgagctgggtggcggcggtcaagagcaggaaatagaggaaatgcgtaagaaggcggagaccatcaaatggaatgatgaggtgaaggctacgttcctaaaagaggtggataagttggaacgcacccatccccagtctcccgactatagcgtgcagctgaactatctgcagacgatgcttagtttgccgtggggcatttatacgacggataatctgagccttgtcaatgcagaaaagacattgaacaaagaccattatggtttggagaaggtgaaagaacgtattttggaacatcttgccgtattgaagctgaagggcgatatgaaatcccccatcatctgtctgtatggccctccgggtgtgggaaaaacctctttgggacgttccattgcggctgccttgaagcgtaagtatatccgtatgtcgctgggtggcgtgcatgatgaagccgagattcgcggtcaccgcaagacatatatcggtgccatgccgggacggattatcaagaatctgataaaggcaggttcctccaatccggtatttattctggatgaaatagataaggtgagtgccgaccgccaaggagacccctcctctgccctcctcgaagtgctcgacccggaacagaatactacattccatgataactttctggatgtggactatgatttgtctaaagtgatgttcatcgctactgccaataatctgaataccatccccggaccgttattggaccgtatggagctgattgaggtaagcggctatatcacggaagaaaagattgaaattgctcgccgccatctggttccgaaggaattggaggcaaacggtatgaaaaagaatgatatcaagattccgaagaacacgctggaagccattatagagaattatactcgtgagagcggtgtgcgcgaactggaaaagaaaatcggaaagatactccgtaaatctgcacgccaatatgctacggacggttattttgcgaagaccgaaataaaaccgggagacttgtatgaatttctgggggcacccgaatatacccgggacaagtatcagggtaatgagtacgcaggagtagtgaccggtctggcgtggactgccgtaggtggtgaaatacttttcgtggaaaccagcctgagccgtggcaagggcggacgtttgacattgaccggcaatttgggtgatgtaatgaaagagtcggccatgctggcattggaatacatcaaggcgcatgcctccctgctgaatcttgacgaagagatttttgataactggaacatccatgtccatgtgcccgaaggcgccattccgaaagacggtccgtctgccggtatcacgatggctacctccctcgcttctgccctcacccagaaaaaggtgaaggctaatcttgctatgacgggagagataacacttcgcggtaaggtacttccggtaggaggcatcaaggagaagatactggctgccaagcgtgccggtatcaaggagattatcttgagcgatgagaaccgcaagaatatagaagagatacaggatatatatctgaaaggactgactttccactatgtgaaagatattaaggaggtgtttgccattgcgctgactgatgaaaaagtagccgatgccatcgacttgtccgtaaagaaagaaaagactgaaaagaaagaagaatgacattcgagttacaatatacagacagcaagaccaatgcacgtgccggactgattactactgaccacgggcagattgagacacctatctttatgccggtaggtacagtgggaacagtgaaaggcgtgcatctgcccgaattgaaagaggacataaaggcgcagataatattgggtaatacctatcatctttatctgcgtccgggactggaagtgatagagaaagccggtggactgcataagttcaacggctttgaccgtcctatgctgacagatagtggcggcttccaggtattttcgttgtccggtatccgcaagttgcgcgaagaaggtgcggaattccgttcacacatcgatggtagcaagcatatctttacaccggagaaggtgatggatatagaacggactatcggtgcagacatcatgatggcctttgatgaatgtcctccgggggattcggactacgaatatgccaaaaaatcactgggattgacacatcgctggctggaccgctgtatcaagcgtttcaacgaaacagaaccgaagtacggttatcagcaatccttatttcccattgtgcaggggtgtgtctatcgcgacctccgcgagcagtcagcagagtttgttgcctctaaaggtgctgacggtaatgccattggtggtctggctgtgggcgagcctgtagacaagatgtacgagatgattgagttggtgaacgggattcttcccaaagacaagcctcgctatctgatgggagtcgggactccggtaaatatcctggaaggcattgaacgcggtgtcgatatgttcgattgcgtgatgcctacccgaaacggacgcaatggcatgctgtttaccaaggacggcatcatgaacatgcgcaacaaaaaatgggaaatggatttctctcccattgaagcggatggcgcctcttacgtggataccatgtacagcaaggcatacttgcgccatctgttccacgcacaggagctgcttgccatgcagatagcatctatccacaacttggctttctacttgtggctggcgggcgaagcacgtaagcatatcattgcaggcgactttgcaacttggaaaccgatgatggtgaaacgcgtatcgacaagattatgagaaaaatggactggaggatatggaagaatataaagctgccgagaggtaaattcttgaagcggctggactggtacatcattaagaagttcttaggtacgtatgtctttgccattgcattgattatctccattgcagtggtgttcgacttcaacgagaagatggaccgcttcatgtctcatgaagcgccgtggaatgcgattgtctttgattattatctgaacttcatcccctactttgccaatctgttcagtccgctgtttgtgtttatcgctgtaatcttctttacttccaaactggcagagaactcggaaatcatcgccatgttctctacgggaatgagtttcaagcgtatgctgcgtccttacatggtgtctgcggcaatcattgcggtagtgacgttctgcctcggatcttatgtcatccccaaaggtagtgtgacacgtattaattttgaggacaagtactacaaacctcgtaaggcgaatacggcacggaacatccagctggaagtggattcgggggtaattgcctatatcgaacgttttgaagactacagcaagaccggttatcgcttttctttggacaagttcaatgacaagcaactggtttcccaccttacagcccgttccattacctacgacacgacggccgtgcataagtggaaaatcaaggattatatgattcgtcagatggatggcatgaaggagagtattataaaaggaggtcgcatagataccactctgttcatggagcctgccgactttctgattatgaagaatcagcaggagatgctgaccagccctcaattgagcgagtacatcagcaggcagcggcaacgcggctttgccaatattaaggaatttgagatagagtatcacaaacgcattgccatgtcgttcgcctcctttatcctgacgttgataggagtgtctttgtcttccaagaaaacgaaaggcggaatgggattgcatttgggtatcggcttggcattgagtttctcttatattctgtttcagaccattgcttccacatttgccgtaaacggcaacatgcctccagtcatagctgtgtggataccgaatataatgtatgccttcattgcattttatttatataggaaagcgccgaaataagcatcctaaacctctacttcagtctgctcaagttgaggtttggcgtactaaagtagaggtttaggatgcttgtctccggaagtctattaaaataagaaacccctcccactcttgcgttctacaagtgtgggaggggctttttgttgtattcattttcctcttttgttttgttcccttttttgccggaaagagacgccggtttccagggaacaccctcactttcgtcttactggttctttaagttgctgttgtatgcaccgggcatcagcaagcttaattcaagtaagcggaaagttctgcagcagagatgtttttggcaataattacaccattatcatccagtaaatagttagtgaatccgcggcccaagcgatactttttaaagaggccggaatattcgcctttagtttccacgaaacaagtgggcgtaactatttggtccttacggatggtttcttcaaagattgactgatactcatcgaatgaaactgaaaccatcttcacattgttgcgggcagtagagcgaagcgcattgctcaaacttgcgttctgcatccgggactgcgcgtcgtaacttgcccaaaagctgagcaacacatactttcctttcaaatcggaaaggtcggtttgggattgctctgctgacatggattggattttgaaatccggggccatgtcacccacattcaaacctccggtaggtttgtctttttctacaaaagaagtcaaggaacttattagtaatacaacaaaaatccattttgcatatttcatgcggcacggttttggttaatactatccgggactgtccttcaacagtgatttcttcccggaacatcgtcttctcagagcttgaaatgagtagaaacccattgatattcaaagcttttaattctgaaatcggctgcaaaggtaagtaattcttaaacaaacttccaaataaacaagcatttttctcactttttagagtcatatttttatgttatttagcataaatagcgggaattttccttacttttgtagcctattattctatcaaaaagatgatttatgcaaccattgaacactgaactcatcctgatacgtattacgggtgaagaccgtccgggactgacagcttccgtgacggaaattctggccaaatatgatgctactattcttgatattggtcaagcagacattcataatactctttcattgggcattttatgcaagacggaagaacaacattcggggttcattatgaaggaactgcttttcaaggcttcctccctgggagtgactgtccgtttttaccctattactgccaaagagtacgaggattgggtgaatatgcagggaaagaaccgctatattcttactttattggggcgcaagttgtctgcccgtcaaatatctgctgtgacccgtattcttgcagagcaaggcatgaatatcgatgccatcaagcgccttacaggacgtattccgctggacgaatgtgaatcgcgtacacgcgcctgcatcgaattttccgttcggggcactccgaaagaccgcattgccatgcaagaacagttgatgaaactggcaaccgaactggaaatggatttctctttccagttggacaatatgtaccgccggatgcgtcgcctcatttgcttcgatatggactctactctgattgaaacggaagtgattgatgaattggccatacgtgcaggtgtgggcgaccaggtaaaggctattactgagcgtgccatgcgtggtgagatagatttcattgagagctttcgcgaacgagtggctttgttgaaaggattggatgagtccgtgatgcaggaaattgcagagaatcttcccattacggaaggtgtggatcgcctgatgtatgttttgaagaaatacggttacaagatagctattctttcgggagggtttacctacttcgggcagtacctccagaagaagtacggtatagactatgtgtatgccaatgagctggaaatagaggatggcaaactgaccggtcgctatctcggtgatgtagttgacggtaagcgtaaggcggagttgctgcgtttgatagctcaggtggaaaaagtggatattgcgcagactattgctgtgggcgacggtgccaacgacctgcccatgctgggaattgccggccttggaatcgcttttcatgcaaagcccaaagttgttgccaatgctaagcaatccatcaacaccatcggcttagatggcgtactttactttctgggatttaaggattcatacattgatattcctcgttgaaggcagatgcttgaaacaaatttgcaagtccttgagataattattgtcccaagggcttatttttttactgtaagagtctattttataagtctttttcctatctttgtacgcaaatttaaaagagatacatgaagttttcagaactacatttaaatggcaatgtgctggaggcactggatgccatgcgctttgaagagtgcacccccatacaagaaaaatcaattcccgtcatactcgaaggtcgagatttaatagcagtggcacaaaccggaacgggaaaaactgccgcatatttgttgcctatattgaacaagctctcagaaggcggacaccctgccgatgccatcaattgcattgtcatggctcctacccgcgagttggcgcaacagatagaccaacagatggaaggtttctcttatttcatgccggtttccagcgtggccgtgtatggtggtaatgacggaatactgttcgagcagcagaaaagagggttgacactgggtgctgatgtcgttattgctaccccggggcgtttgatagcccatcttagccttggttatgtagatctttcccgtgtctcttattttattttggatgaagcagaccggatgctggatatgggattttatgacgatattatgcaaattgtcaaattccttcctaaagagcggcagacaatcatgttctctgccaccatgcctgctaagatacaacagttggctggtaacattctgaacaatcctgccgaggtgaagctggctgtttccaaaccggcagaaaagattgtgcaggcagcctacgtttgctacgagaatcagaagctgggcatcatccgtagcctctttgcagaggagacaccggaacgcgttatcatctttgcttcttccaaactgaaagtgaaggaagtgaccaaagctttgaagcagatgaaactgaacgtcggtgaaatgcattccgacttggagcaggcacagcgcgaagaagtgatgtatgagttcaaggcaggacgtatcaatatcctggtagccacagatatcgttgcgagaggtattgatatcgatgacatccgtctggtgataaactacgatgttccccacgacagtgaagattatgtgcaccgcatcggacgtacggcgcgtgctaataatgacggcgtagccatcaccttcgtttccgaaaaggagcagggtaactttaagaatatcgaaaaattcctagatagggatatctataagatatcggttcccgaagagctgggtgaagcaccagaatacaagccgagagcatttgacggaggaagacggggcggccatggaaacggacgtaggccaggaggaaataagaatggccgtaacaacaataaaggcggaaagcccagtgccaaacggccacagaatggcggtgagaagaaataaacactgtggtgtggtgaagaaaagacatagaaaaagcggatttattccgctttttctatgctcattgtacagtcaaaaccaataatcatatttaccagactgtatacggagctttcgggtatgccaagggttgcctggtaatggtatcccttactgtccacacccatgaagttcatatcggcaagaatggcctgattcagtatttcggcagggaatatatccgcaaacatctttttggtgatgtcctggccgtaaagcatcttcttcccttcgtatacacagatatggattacattatcataatacacattgtccacactgattccattttcagaataggaagtcttgaaaaccttcatctttgaggggttgatatatacatatcccctataccttgtattcttgtatattacgatactgtctttctttatcacttctggagtagtggaaatgacttctacttcccggctggtgaaaaccaaagaatcttctgcattctctgatttatgcagtttaattacttcgtcggccagcgagtggaaccagaagctgtattccgtttgacggtctatcttataggccaccggttcattgctgtatatgtagattgtatcgtgaacgaccttgaaagatacgggagcgctttgcgggttggcataatataccgtatccccttcgatgcgcatcaacggcatttctgtttcatcgttcacccagatgccttgtaacagttgctttgcaatgagatcttcctttacggaaacctctcctgtttgtctgttgctgcatgaggctaatgagacaacaagtacaatgagaatcgcacttccttttattgtcataacgtccctatttatttcttttcttttttctgcaactttattttccgatgcaatgatatgtgaaaccttgttcttccatatctttcttgtcataaatgttacgtccgtccaataccaacggctgctccatagttttcttgatgactgcccatgaaggcaggcggaattctttccattcggtcaccagcatcagtgcatctgcatccagcgcagcatcatacatatctgtcgcataataaatactttctcctatgcggcgtcggcattcgttcatggcagccgggtcgtaggcacgtactttacaaccggccttcagcaactcgtcaatcaataccagagccggggcttcacgcatgtcatctgtttcgggtttaaaggccagcccccaaatggcaatggtctttccctccaaatcattattgaaatgcttctgcaacttttcgaataagatactcttctgtttctcgttcacctcctctactgcatggagtacacgcatcttgtagccgctcagttcagccgttttaatcagtgcctttacatccttagggaagcatgaaccgccgtaacctatccccggatagaggaacttgcgtccgatacgggtatccgaaccgataccactgcgcaccatgtttacatccgctcccaccaattcgcacaaattggcaatgtcgttcatgaagctgatgcgggtggcaagcatggagttagctgcatactttgtcatttctgcagaagggatgtccataaagatgacacggaagttgttcagcaggaatggtttgtagagcttgctcattatcttcttggctcgttcggactctactcccaccactacacggtcgggactcataaaatcgttgatagcattaccttctttcagaaactcgggattcgaagcgacatcgaagtcaatgttcatccctctcttattaagttcttcttgaatggtagcccgcacttttctggcagtacctacgggaacggtacttttggttaccaccaacacatatttctgcatattgcgtccaatggtgcgggcaacttccagcacatagctcaagtcggcacttccatcctcatcgggtggtgtacctacggcactgaataccacttccacctcattcagacaactctccagagacgtggtgaattgcaggcgtcctgctttcacattccggctaaccatttcttccagtccattttcatagataggaataacaccctttttcagtgactctatcttttcactgttcgtgtctacgcaaataacgttgacaccgatttccgcaaagcaggttccggttaccaaaccgacgtatcctgtaccgacaatggctattttcatattttattcataatagaccgcatccttgaacgatacggcatgtccgtctttatctgataatagaagctgttccgtagcaacgggccattcaataccgatggtttcgtcgtcaaaacggatggatgcctcggattgtggtgcgtatacgttgtctaccttgtatgtaaagacagcttcatcgctcagcaccagaaaaccgtgggcaaaaccacgcggaatgaagaattgtcttttgttctcctcacttagctccacactgacatactttccgaaagtgggagaagattttcttaagtcgacagccacgtccagcacttttcccttaatgacacgtaccagtttggcctggctgcaatcacccttctggtaatgaagaccacgtaatacaccgaaagaggatttggactcattgtcctggatgaagtgaacgtttccgacatgtgcacggaactcttcttccttaaatgcttccataaagtatccgcgggcatcatggaatactttcggctcaatcagccatacgccgtcaatctctgtttgtatgtagttcattttcttaaaatgttttatgtactttcagttggaatccaaaattgtctccatatatctctcccatatccaatgcaagggacgcgttgaagcaccagcccttccatttacggggaatatagtaaaacgatgcaaaagtagaaaaattttctaatatatcgggtattggacgatgaggagttccccaagttctgttgtgggacaattttgccacatatctccactcactgctgatgtcgccgctccatcccagatgcagggccttaacgcgattgtacttgaaactcatatcgccatccttattatagataggcgatgctatcaacggattggctatcgccataccccaatgtgcccatcctgggtagtaaccgttgttgtagtagttgtcggctcctccggtcttacctactacagaattttgcaaaccgtgcagtggaccgctcatattggtagtctggagatattcgataacgattccgttgatggcttgtctatggttggatttatattccacaccccataagccatcccaaccgttgagtttggccatggcggagaagtcatcaaaatgattgtccagataggcgctgatggagaaatcttccttaggacgataagtcattttgatatattcgctacccagaaaattgccttggaaagccagatgttcacctaccggtccgtcctcacgcccgtggccggggaagaatacgcgtacgtaatccttccatccgttgcccaagtctcccgattcggaacctccaatcttgtatcctccgaattgggtgtcgagggtcattccgagttccagttgccattttcctttgggtataccgatacgcaggaacccttctttatgatggtatttgatactcttggtgtaccagtatttttctccgacttgctcccgctggtatttgttatctgtaaaccatccgtacgagatttctcctttcaggcctaaacggggtagcaactgtacatactcgggtatgcctatctgtacttgtgggatgggacgcgcattacccgaccaggtcatgccgccactgctcagctcttgattcagcaatggagaattctgttcccggcttccggcaaagaatccaaaccacttgtaacggatgtctacgtaagcctgctgtacaatgaaggaggtcgtgctgaatccggctgctgcaaccaaatccagtgcttcttcaaacttccattttccaagttggtgtttgtaggatattcctccacgtatgtaagtattgttgtcgagcgaagtgagtccttgctggttgctgacctgccaaagaggagtattgtcaccggtatgcagggctgctccatattctacgaatgaggacagctgctgtgccagcatcgtgttctttcctatgaacaagaaaaccatcagacagaaaataatacgcataatagtcttttgttaagtgtttaggtttgtatactcttgcgaggacaattgtctttctattcttgacgagtatagttaaacggtacaaaagttgaaatttttccggtaaaaattccttctcttgccaaaaaacctttttcaaatacattttcaatgtgcaatgttcataatttgttgataagaaaaaagctctgaaactagcgtatatccgatatttccgctacttttgtagcatgattgaattagcacagcacatagaagtattgttattggagaacgattgtgtcattgttcccggtttgggaggatttgtagcccattatactccggcaatgagagtagcagaagagaatgtttttctgccccctacccgtattatcggtttcaatcctcaactgaagatgaatgacggcttacttgtacaatcctatatggctgtctatgatactgatttttctgatgctacgcggattgtagaaaaagaagtggcgcatatattcactgctctccatgaagaaggtaaggtggatttgcccaacattggcgaattgcgttactccattcatggtatttatgactttgttccctatgaccacaagataaccactccttacttatatgggttggatagttttgaaatgcaggaactggcggaactgaagaaaccgtacatggaaaagaccatccgttattctgttccagttgtgccggaagacaaaaagcgaaggtttgagattaaattcaaccgttcctatttgtcgaatgcggttgccatgattgcagtggttgccttgtttttctttttgtctacaccgatagagaatacggaagtggttgaaggaaattatgcgcaattacttccgaatgaactttttgagatgatagaaaaggaatcccttgccattaatccgattgttgttagccggaaggccgacactccgaaagcgtcggctcaaaaaaacacggggcagaaggcaaagaaaaaggtggttccggttgccgtaagagaggttaaggtgggccaagctaacgcgcagaatgctccggttgtttctcagcctaagcagcaggcggcagaagtgtcctcttcaacatctgtaacaacaaagagtgaaattcaaaagaccacagcagggactgtcgccccgtcacttgtctctgcacagaaataccacgtcatcattgccagtgtaggtactgagaaggatgccgaagcaatggcaaagcaactgattgaaaaaggttaccctcatgcaaaagcaattgttggagatggtaaaatgcgtgtcagcattgagtcttgtggcacagaaacagaagcatatcaggcattgaacagagttcgccagaatgaaacgtataagaacgcttgggtattaaagaagtagaaagtaatctacccttgctttattttttaattctttaatttttaactatcatgaagcgtatccgttgtcccaaatgtgagaattacttaacattcgatgaaaccaagtataccgaaggccaatcactggtctttgtatgtgaccagtgtaagaagcagttcagtatccgtttaggtaaatcaaagatgaaagcccctcaaaaggaagaacgtccggatgaagcggagtttaaagaggcttttggcagcatcacggtcattgagaacgtgtttggttttaagcaggtacttccattgcaagaaggtgacaatatcataggccggcgttgcgtggggaatgttatcgatgtgccgattgagacttcggatatgagtatggaccggcgtcactgtatcattaatgtaaagcgtaataagcagggagtgttgatttataccttacgcgatgctcccagcctgacgggaactttccttaataatgaaattttgggtgacaaagaccgcattcgcattgaggatggagccattgtaactattggtgccactacttttatattgcgagcggcagaacaagagagcctttagacaaaaaagaaaactgtgtatttcccattaaatgtggtataaataaagcagaccgtacaaaaaaagtttttgtacggtctgcttgtttaaagtcataggaattaaagaatgccttttactgtttctgacatacctttttcttggatggattttaagaagcaggtaatcatgtctgtcaatcctggaacggtattcaagtctccgtgttccccccaaataaggtctttggctgccaatacgccttctgccactttgtgagtatcccccgttgcccaaaggtctttcaataactgcatgatttcgggagcatcattcgggatgatttctgtgccgtctgcgcgggtacctcctttgtagtacgtgatgatggcagccagtcccaatgccagacctttcggcagttctcctttacgtttcaagtaggtttttaggccgggaaggtcacgggtttggtatttagggaaagagttcagcatgatgctggttatggcatggtcaacaaatggattgttgaagcgctccaatacatcttctgcaaactttttcaattcgtttttcggcaggttcaacgtttccatcagctcgtcaaacatcactttatggatgtattgtccgattataggatgctggcaggcatcgcgtacaatatttacccccgacagataggctaccggagacagtacggtatgaggtccattcagcaaggttacttttctttcgtggtaaggtttttcggaaggaacaaacaatacattcagtccggctttgtcggcagggaattcttcggcgacttcttgcggagcctcgatgacccataaatggaaaatttcagcctgcactaccaaattgtcatcgtactgtatcttttcttttatagcggcaatgtctttgcgggggaatcctggaacgatacggtctactagtgttgcatatacaccgcaggcttcctcaaaccaagttctgaactcatcacccaactgccataattcaatgtattgatagattgtctccttcaacttgtggccattcaggaagatgagttcgcaggggaagataatcagccctttgctcttgtcgccgttgaatgtcttgaagcggtgatacaacagctgtgtcagtttgcccggataagaagatgccggtgcatctgtcagcttacaagcagggtcaaaggctataccagcttccgtcgtgttggaaatgacaaaacgcatctccggttgttcggccaatttcatgaactcgtcgttttgagtataggggtttaaggcacggctgattacatctatcatagtcagactgttgatggtttctcctttatccagaccttgcagatttacatgataaaggtcatcctgggcattcagcatgtcaaccatacctttatcaatgggttggaccactaccacattgctgttgaaatcggtcttttgattcatgttataaataatccaatccacaaatgcacgaaggaaattaccttcgccaaactggataatgcgttccgggcgttgtgctttgggagcagtttctttgtttaatgctttcatttaaaaaatgatttaaatggttgatatgtaattttttgattattcaaactcaaagtaaaagtctatgttttcctccatcaatatgtcgatgggcatgtatttcactgcagtgaccggtcttttaaatatcacgtggtcgcataaagtcttcacgccacaatagccttgcaggcctgggcgttgaccgatgagaaaggttacttcaccggttttcaggagctctgtatttttgtgtaaaaggtcatatcccacaagtcctgccaacttctgccccttttcgtgtagataacttgccacctgataaatacgggagttaaaaacagctcccagtacggcttggggatgttctttaaaaaaagcatccaacatccgtctgttgccgtcagtatcttccttgcgcaacacaatgtcatggatagtcaaatccttatgttcctcggaaaggtattgcatgaacccctcgaggcggcgttgcatctggatttctgccggattgtttttctgattgttcaggaataacacaagctcctgccctttttcatagctacgcatcagaatcttggcagcaatgtatccgctggttttagaatcttgtccgatataacacaaggcatgcgtctgttcaatattgaagtctatgaatgcatagggaatatccgcttcctccaaataagtagtgagttctatagtctcctctcggaaattcggggcaacaagtacggcgtcggcattttcctcccggagcacagcacatgcttctttataggaggatttgtccgcatgtcgatagtagagatagctaactccaacattgaacggccgtaattcttgtgcggcacggtcaattcccgctgctacagcatgccaataatcaataaggtataatgcagacaatatgatagcgctttttagccgccagcccgatggcaaacatattgggatgataatctatctcgtcgagtactttctggactttttctctactggaaacggatacgtctccgcggttgtgcagtacgcggtctacagtgccggcagagacgccggccatgcgtgcgatgtctttaatggtatagttcttgttttccatcttgaggtatgctgcctaaggcggtaaaggtgagacatctgaagcttaaatattataaatattcgccgcaaagatacgaattattttgttcctccaagtaaaatttctacttttgtgttcgataacggttaataaaactaaaaacagatatatcacctattagctttacaatcaatactatataggtataatagacgaaaagtaatatttttatacacttaaaacacaagaagatgaagaactttatggacgggaacttcctgctgcaaacggaaacagcacagaggttgtaccacgagcatgcggcgaagatgccgattatcgactatcactgtcacctgattccccaaatggtggcagaagattaccagtttaagtcgttgactgaaatttggttgggaggtgaccactacaagtggcgtgcgatgcgtaccaatggtgtggacgaacgtttctgtaccggtaaggatactacagattgggaaaagtttgagaagtgggccgaaacggtaccttatactttccgtaatccgttgtaccactggacccaccttgaattgaagaccgcttttggaatcgataaaattctgaatcctcatacggcccgtgaaatttatgatgaatgtaatgagaagctgaaacagcctggatattccgcccgtggcatgatgcgccgttatcatgtggaagtggtttgtactacagatgatcctattgattccttggaataccatatcaagacacgtgagagcggctttgaaatcaagatgttgcctacttggcgtccggataaggcaatggcggtggaaattcctgccgattttcgcgcatatatagaaaagttagccgaagtgagcgatgtggctatttccagctttgacgatatggttgctgccttgcgtaagcgtcacgattttttcgcggaacaaggatgtaaactgtctgaccacggaattgaagaattctatgccgaggattacacggaagctgaaatcaaggccatctttaataaggtatatggcggtgcagaactgacgaaggaggaaatcctgaagttcaagtcagccatgctggttatatttggcgaaatggattgggagaaaggttggacacaacagttccattatggtgctattcgcaacaacaatagtaagatgttcaaactgttaggtcctgataccggttttgattccattggcgaatttactacagcaaaagctatggctaaatttctcgatcgcttaaactccaatggtaagctgaccaagactattctttataatttgaatccatgcgccaacgaagtcattgctactatgctgggcaacttccaggatggtacggttgccggtaagattcaattcggttccggttggtggttccttgaccagaaggatggtatggaaaaacagatgaatgccctttctgtactgggcttattgagtcgatttgttggtatgctgaccgattcccgttctttcctctcctatccgcgtcatgaatatttccgccgtacattgtgtaatcttgtaggccgtgatgtagaaaatggtgaaattcctatttccgagatggaacgcgtaaaccagatgattgaagatatcagctattataacgctaagaatttcttccaattctaaaaagcaatagtaagctataagttatgcagtttcacccataacttatagcttatctaatattcctttgatactatccaatcgtataaaattgggatgtcgtatttccccttcatgttgctcgtatgcccaagtcacgtggtatggtatatgggcagcgtatcccccaagttccaataccggaagtatgtctgattttacagaattacctaccatcaggagtttttcaggcggacagcccaatgtatcaatcagcctctggtaatcatcgattttcttgtcactcataatttcgatatgatggaaatattctcgcagtccggaagcttctatttttcttttctggtcgaacaagtcccccttagtggccaacaccaatttatatttcccatgaagtgacgatatagtctcctttacgccttccagcagtgtgaccggtttctgcagaagctcttgtccccatcctattacttcttctataagacgtatactcccgtttccgtctgtcactttgcagatggtttcagtcatactgagcattatgctcttcagcccatagccatacatatggagattcttcatttctgtttcaaaaaacctttgtgatatggatgaagcaggtagatattgtcttaaaaggttacagaatttgtgctcgaactcctgaatataaagttcgctttcccacagtgtgtcatcagcatcaaaagctatgaattcgattttatctttcatgaatggtcgtttttataaaagcgcccaaagatacggagtattctatataaatgaaaatataaatagtgataaatgggaagttaatatcttgtctgcaacttattaatattgtgtttgcagaaaattaatatcttgcaaacacgatattaattccgtatttttgcacttattttttcatttaatacataaattttaatcgtacaaaaggatgatgacatcaccccaacccgcttccaaaggcttcagcagagctttttgggtaagcagtacagtagaactgttcgaacgcatggcatattatgctgtatttatagttcttaccatttatctttccaatattttaggtttcaatgattttgagtcaagcatgatttccggtctgttttcgggagggctctatttgttgcccatctttacgggcgcatatgccgataagataggtttccgaaagtcgatgattattgctttttcactgctttccatcgggtatttgggcttgggattgcttcccaccctactggaagcagccggtctggtggagtatggtgagacaacccgtttttccggattgccggatagtaatgaccgttggatgattatccccgtattgtttgttatcatggtaggaggctcgttcatcaagtctatcatatcgggatcggtggctaaggaaacaacagaggctacccgtgctcgcggctattccatcttctatatgatggtgaatataggagcttttaccggaaaaacggtggtcgatcctctacggaatgttatcggtgagcaggcttatatttatattaattacttctcggctgccatgacggtgcttgcattattggctgtcgtcttattgtataaatcggcacatacagcaggtgaagggaaaagcatgcgtgaaattgggcaaggttttctgcgtattatcactaattggcgtttgttgattcttatcctcatcgtaaccggcttttggatggtgcagcaacagctctatgcaactatgcccaaatatgtcatccgtatggcgggtgaaacagccaaaccggggtggatagccaatgtaaacccgtttgtagtggtttgctgcgtaagttttatcacccggtggatggcaaagcgcacagctattacttctatgaatataggcatgtttcttattccggtatcggcattgctgatggcatgcggtaatttgctgggcaacgatattatttccggcatgagcaatattactttaatgatggtgcttggtattgttgtgcaagctttggcagaatgttttatctcaccgcgttatctggaatacttctctttgcaggcccccaagggcgaagaaggtatgtacctcggtttcagtcatcttcattcattcctctcttctattttcggattcggtattgcgggggtgcttctgacaaaatattgtcctgatccagtcttgtttgaaacccgcgaagcgtgggaagcagctagtgtcaatgcacattatatctggtattatttcgctgttataggattggttgcggcaatagcattattcgtttttgccaaaactaccgaattcatcgacaaaaagaagaaggcataaggtttatatattgcatactttttgtatatttgccgtcactttttttaaaagcgacggcttttttgtaattaaggagattaggatgaaagtaaaatttataagccttgccagtggaagcagcggtaactgttattatataggcacagaaaaatatggaatactcatcgacgccggcattgcagtacggacgataaaaaaaggactgaaagaagcaggtatcagcatggaaatgatacgtgcggtatttgttacgcatgatcatgcggaccatatcaaagcagtaggcggattgggtgagaaacagaatattcctatttatacaactgcccggattcatgagggtatcaaccggagctattgcatgacagaaaagttatattcgtctgtccgttacctggaaaagcagcaacccatgcagttggaagattttcatatcgaatctttcgaggtacctcatgatggcacggacaatgtgggctattgcattgagatagacggaaaagtgtttgcctttcttacagaccttggtgaaattactcctacggccgcagaatatatcagaaaggccaattatctgatattggaagccaactacgatgaggaaatgttacgcatgggtacctacccccaatacctgaaagaacggattaccagccgcaccggacacatgagtaatattgctactgctgaatttctttcggaaaatatgacggaacatttacagtatatttggctttgtcatttgagcaaggacaacaatcatcctgaattggcatataaaacagtggaatggaaattaagggaaaaaggaattatcgtaggaaaggatgtacagttgtgtgctttgaagcgtactactccttctgatttatacgagtttgaataaaaaatcccatttcatcgcaaaaaataccccgttttgtttgcacgaataaaataaaaggactacttttgcacccgcaaacaagaaataaggaatgcactcttagctcagttggtagagcaactgactcttaatcagtgggtccagggttcgaatccctgagggtgtacttaaaaaggaacaatattgttcctttttttatttgtcttaacaagaacaagctttgatgggtgtaagctccttatacgggatcgctagtaaatctatatggggatgatacattatttttcgttagtccgcataataaatttttcagaagtttgtttttttatacctttgccctcacccgcttgccgcctctttcgtcacatttgaaaatatatgtcagaaatgaaagtaggaagaaaacttttatttcctcccactcatatatctatatttattatttggggaagaatcacataatccgctaagaatatggtttctacatgcttgcatcaattgcgttgatatacaactcactttatgtaaaggtacgatttttacggaacatgcaaaacacctttgatctttcttttcagcaaccgtcaaaaacaaattcccggtttcatatccggtcacaaaggtggtacagcctctttactattaagttaaaaaaatcaggcaggattgaaacatactgttacggtcgtgtctgctgcgattcaagatagcccgtactttccgacaggaggcaaggtcagggggcaagataacgtgtacagcagaaacgaccgatccgatgggaacagtcagaaaaggatcacatacaggaattacagcctggtaccaggcaggggacgactttgtgacaaagtcccaaaagaggttcttttttccagacggcaaactccctcacctcaaagaaacagtctatggctggcgcacgaaacgtccagccttatgaggacttaacacccgcagcctgcacatgtgcgtaatagaaagggaaatataatcttcatccgcttccccgcgtcttgcctacacccttgtattcccggttcaacccctgcttgatctcgctcctcttgtacaagaccttgccgccgagaatgtagtaaggcagcgtgccgttgctccggtactcgcccagtgtcctgcggctgacttttaacatacacgccacctccttgtcgcacaggtacacgtcttcttttagcggaatcccgccatctctggagatgccgtcaatcatcaccgacagccggtcgatacgctccacgtcttccggcaggtaataggtacggttgcctatcttggtataggcgagcgtgccgttattccgcaaggtgcgcttgctgattttcagcttcatgcagacatcctggtggtcgagccagccgcccgtccccttcacgcctttcagattcagatggggaatttcctccaccctctgtatgaactgttcgatcttcatggcaaattcctcgaacgccttcctttcaaaacatacgatttccatcacattccgattttatattgatactccaaattcataccatccggagaaacggtcgcttgtggtgccggtatcaccatatcaggcagttccgcaccgttcccaattgttgccccgttgcaaataaaggcaggaaaaatcgtattacaatggacctgtccgcacatgtcatctcctgacataatgtttcatgccggatgatatgactacatgtcaaaatcttcattccggaggatgtaacgggggcagatgatttttcagaaggacacgcccccccgtttctttgaggcaaaggtagtcgtcccccaccggagcgcaaggccgggcccttcgggtcggcggggaaaaaatcatcctcacgcttcgcgcttcggtattttttcctgccgagccttgatgccgttccggcgggagaacggctgtaaggcatacaaagaaacaggagtgcctgcacaacaggccggatgtataaccaataaaatgaaagaaatatggcagctaaagacgtgaaagacttcaacgaatggttcaaccgttcatacgcgagactgaaggagagaatctccatctaccacgggaaaacagacgaggacgtgttccacgacgcttacctggcagtcaggaagcaggtgatgttctcaagggaagggatagaaaactgggaatcctattttttcggctgttaccggaaaatggtgcaggccggaatgagggataacagccgctactcctgccccggtgacgggtatttcatcacgccgggagaaacggatgacagggaagagacggaggaatgggaagagatgcttaccggatgcgacatgctggtgagggacatccagaagttcctcaggcggcatttctcctacgaggattacaggatgttcatgctgcgcttctacgagacgagcagctcgttccgtactatcgccaggcacatgggcgagaaaacatcggtgataacccgctgggcacaggtcatgctggaatccgtccgcgccaaccggacgttcacagcccgaaggagattgatagccgccagagacgcggcatgatgataactctataattaataataaactaaaattggatcgtatgaaactgacagtttacaacaagagcaactcccacccggcactgacctacaagggcaagcgggtgatcacggtatgccgcgacggcagcatgtacctcagcaggatattgagcaacgagctcagccccttataacaaactaaccaaccaacattacaacaagccaaactgccttataactaaccatgcagacaaccgtacaagggctatccggcggtggcagtggcatactgaccggacagacctttttatggaggaactgtccgtcacaaaggcagcctgtacgaatagcataccccaattctggaataacataataaaatatgtccccccgccagagggattacagcatccatgagcgcatctttccgaccttccggcagtggtaccttccatcacctgatttatccgacagaccaggattccatacattcggtaacggtcggaagcgaccggtaacatgaccaccgttccactatcggaaagccggtaacaaccgttccattcccatacttgaaaccactattccttccgcccattctcatgtctgcccgttcaacaccggcagaacatggaaagcgtcgccatatacaaagcattccaagaagcaatacgacgcataattgccaacctgcatccaatctgttgtgatttaatacaatgcatactttctttgcaagtgacaaaaggtcatgtaaacatacgatgaccacagtattaattgttcaaacattagtaaggatgaaaaaaaagcaaaatttcagtgacgaggaactgatgcaggtgatgggactggatctgccttcatcaaagtctggtacagaaacacatggggaaacagtttcagaaacaatggctcccatttttgatgagcctgaaagcatggaacaacctgcccccgttccggaaacggaacgcggacagccggaagagccttcttccattacggggcagacaccggagccaaccgcccggcgcaggacaagcggcaaacaacgcaaactttcgctggaggagtaccggaacaccttcatgcggccttacaggattgaagaccgcaagccggttttcatcagccggaaattgcgtgacacgcttgaccgtttcgcctgcaagatcggcgagaaccgcataagcctttcgggcttattggagaatattgtccggcaccacgtcgaactttataccgaagatttcgagttttggaagaggctgtaagcctttatttccattcaattaaaaggcattttgacgggatttctttttcggggggcaaaatatagaaactagctactcccgaaggccgccgaagaggtacatcccgccggtctgtaaagtaaacagagtatgaatcgtatgcaaaaaatgtaaccggatgatacagaagaatgataccgacagaaacaggggaggacgcccggcaaaagggctgtccgagaaacgcaaataccgcatcacggtaaagatggcaaccggggaatactatgccctgaagtcgaaagccagaaaggccggtgtctcggcaagcgagatggtgaggcaggcggtggacgggtgcgtggtaagggagaggctcaccaccgagcaggcggacttcatccgcaagctctgcggcatggcgaacaacctgaaccagctggcccggggggcacacagggagggcgtaaggctgcattccggacaatgccgacacctgctgctttcgctggaaaccctcatagaccgtatcagtctatgatcgcgaagattgtaaaaggcgcgggagccaaagggattgtggattacatccttgacaggaaaaaaggggcctcgcttatcgaccacgacggagttctggtctccgacaacggctcgatagcacgcagtttcatcgcccagtcccggtttaatccgaaggtgggtaagttcatcgggcatatctcgctcagcttttccgagcaggacctgccacacttaaccgatgagctgatggtgcggataagccgggaatacatgatgaaaatgggcatctgcgatacgcagtatatcatcggaaggcatcacgacaaggagcatccgcacgtgcatatagccttcaaccgtatcgacaataacggcaggactatcagtgacaggaacgaccgctaccgcagcgaacgcgtctgcaaggagcttacccgcaagtacgggctgtacttcgaggagggcaaggagcaggtgaacacggaccgactgaaagaaccagacaggacgaaatacgaactgttttttcttcttaaaacgaaagtgggaaggtgcggtgactggacacgcttatcgccaatctgcggaaacaagggatggaaatacgcttcaagtacaaggggtggacggacgggatccagggcgtggtgttcggtaagaacggctattccttcaacggctcgaagattgaccggcagttcagttactccaagatagctgcagccttgaaccggaacagtcttcaggaacggcaggcacaatcctgccggcaaggtatcagcccggcttcagacggtagcggggagctcatcagcagtttattgggactgctggacctcccccccccccttcatcctgcaccgagactccggagaaagccgcattccgccggctgatgcaacagaagaagaaaaagaagaagaacaagggatttaaaatttaacaacaacctaaaaaacaatcaagatgaaagaaaacacaggaaccatcatcgccatgctggaagaactgctgaccatcagcaagagccggcaggcatcgcaaagcggcagtaccaatgccgccaacatggatattgctcccttcaagacactgatcgaggaagctggccagcgtacggaggccggactggcgaagttcgccgggaacattacggattgcctgaatgcaatcaacaaccggatagacgggattgcccgaagggaacagccggatttcgggaaaatcagagaactgttagagcaggccacccaaaagacggacgaggcaagcattcggcacaatattaacgagacccggcactcgtttgcgcttgagaacagatgggactgggcgattgtcatcggtatcgtccttctgatagccctgttagcctcgacgctctattccgagaggagacaggattatgaccgcatcgacaacgacttgaagtaccgttacatcaggatgaagggcgaagcatcgcccgaaagcatcgccggactggaaaatctcttcgagctcaaccaggacaacgggaagattaaacagatacgcaaggacgtggaaacctacgaggaggtacgtctgaaagagcagactgcaagggaacaggagaatagggctgactcgatcggaaacaaaccttcaaaatcccgataaggttatggcaagcgtaaagatcaagttcagaccatcgacaaccgatggtggacaaggaacattattctaccgggtgatacacaaccgcatagcccgtcagcaaaagacaggctaccgtcttcacgccgacgaatgggacagcaacttgtccgaagtagtgctgccatcggccgacgggaaccggaaaacttacctgtcggaaatcaggaacagcgtggcggcagatatacgaaggttccacaaggtcattgacacgctggaagtcagcggacatgcctactctgcggatgacgtaatggccggttttacggcggacgagccgggaaaccttctattcggattcatggagagtgtcatcgcccgtctgaaagcattgggcaaggcacgaacccgggaaacatacactacaacgctgagcagcttcaaacgtttcaggaaaggtggtgacctgcttttggacgacatggattcagacatgatggtggcatacgaagcctatctgaaaaggaacggtgtcagccccaacacttcctcattctatatgcgtaacctgcgtgctgtctataaccgtgcagtggaaaaaggactggtcgagcagaaatttccctttaagcacgtttatacgggagtggagaagaccgccaaacgggccataccccttatggcagtcaggaaaatcaaggagctggacctctcatcaagcccggcattggattttgcccgtaacatgttccttttttcattctatactcgtggcatgtcattcgtggacatggcctacctgcgcaagaaggacttgaataacggtattttgtcctatcgacgccgcaagaccggacagcagcttttcatcaaatgggagaaatgcatgcaggagatagcggacaagtacaatacggaatactccacctatctgctacccgtcatcagccctgaaagcggtgtggaagaaaggaaacagtacatcaatacggcacacaacgtcaaccgcgccctgaaagtcatcggtaaacggctggagatacccgtaccgcttacaatgtacgtcgcgcggcatgcctgggcgagtatagcccgaagcaagaacgttccactgtcagtaatcagcgagggcatgggacatgactcggaagctaccacgcgcatctatctcgcttcattggatacggcggcggttgacaaggcgaacagcctgatcctgaaatccctgtaacatgcagggttgttgagcgaatacaaagtctctttgtaagagaggtgggtatatccgttatcaattgatagtcagcgatatagaatacagtgaattgtagcgttcactccacaaatgttactatataccaaacagaacagactgtcagttgcattttttaagcaaataaatgtgctaattgctataaaattcttatttttgcatcaacaatcacctctcttacaaagagatataatttctcttacaaagagaagttgatttgaataatataaatatttaatattcattattgttttaacccttaaaagatttttgtcatggacaaggaaatttttattgaaagttacgaagctccccaggtggaagtggtagaagtagaagtagaaaaaggatttgcggtaagttctggaggtgaagacggaaactggaattgataacttttccggaaattcggtttgtatgtaaatttacacgtctataaaaaatgaatttaaattagtaaaaatgaaaatcagatctttaattagtctggctatggccacattcctgataacggcttgtagcaatgaaaatgatgaagaattgatttccacttccacaaaaggcatactgagcgctaccgtggaaggaaaccattccagtacacgtgcggggtttgcaagtgatggcaaattctactggtcaaaaaaagaccaattaggtgttactacttcccaaaacgccagtagcttttcagcccttagcttaaaaaatggcattggaactgcaagcggtacttttgacggcgtaataaacggaaccatcggcgattatgcggtatatccatactatgacaaccatagcataaatgatgctaccttgacttataatttccctacatcctatacatataataaagtggatgcggattactttactacggttcaaggtgaaggcaacagcttcaatccggccatgtggggaaaaattgtaaacggtgctgtgcaaatgaaacacttgggcggtgtgttctgcatcaaagtgcctaagatgcctataaaggcaggaaccttgtctcttattgtagacaagaaaattaccggcacttttgcggtgaacttaaatgacaatattcctgtcattgcatcaacagagacaagtaccagtgaaaataatacagtaactattgaattcagtggtgctacccaggatcagcccggtgttttctatgtgcctgttcctaccgggacatacgatgtacgtataaaagttacagaaaaccaaggctctactgaaaaagtgaatgttgcggcaggtacttatactattgtccgttgtgacttgaaaaaaatcgaattgaccaacggaaatatagatgctacggttcctacagaatctagctccttggatgatgccgctacgaagttggcaagtaacgatgcagtaagggtcaacggagaaatttcaggtaccagtaatacaatcagcgttcctgccgcaacttcgggtaccggtaagagcctttcattggagaaagtagcgagcggagcatcccttacggttttagacgcgaatagttcaggttctacagataattccgtagacaacttcaccttatcaattcccaacaatgaaactgctgggtttgaaccgttggatgtaactataaccatgccgaacacaaccgttgccctgaccggtaacgcgggtgcagctatttatggtacagtcacatccgaaacagcagataatacacttgtcattggcaacggtgtggaagttaaaaaggtggtcgtgaaaaaaggtaatatccgcgtaaataagggagcgaaactggtagctattgagaaatcgtcagataatcaagcaacgactgtaacagtttataaagaggatggtgctgaaattccgtcttcgttgggtgaagaatttgtcgttatggatgccgctgtcgccgatatgcagaaagtgtttgcagaaggcggtacttacactttgccacaagacatgaatattgtaggagttgaaatgatggttcctaagggcaaagaggtgacacttgatttgaatggcaagacactagaagccgcgaacgatggtcttattagagtagaaggctcttttattttgcaagacaatgctggcaatggtgtcattaaggctacgaaagattatgtttatcaagtttattctaccggtattatttatgtggatggtgaggatgccaaaatgacgatgaagagtggtaacatctatgcagtacgtgacaatccggcaaataacggacagtttggtatcggactctggcgtggtgctgaccttacgatcgaaggtggtaagattgaagccggttggtatgcagtttctggtaacggtcaaaatacgacacagaattctgtgatcaacatcacgggtggagaattgatttctgcggcagactatgctgtctatttgccgcaagccggtactaccacaatttccggtggaaccatcaagggtgcttgtggtgcaataggtatgcgtagcggcacattgaatattaatgaccaggctaagctcattggagaaggtacaggagattccggtcaatggggtgacggtactggaactatgggatatgctgtgattaacattggtactggcaatcaaaatacttatggcgattgtacagtcaacattactggtggcacattcattgccgaaggcaaatcggtaggaattgcaaagcgtgaagatggagcaaagcacaatatcacagtgtcggttactggtggcacgttctccgatttgagcgcaattggctttatcgctgaaaatgcggatgtaaacattgaactcaacaaagatattgaaatccaaaaggctgtaaccttgatgaaggcaggagcaatgacaaccgtcaatctgaatggttatactattgccaataagacggattttaataatgcaggcgattgggaaacagaaggatttgttgtgactgccggtactcttaatatcgaaggagaaggtaatgtggaatgtatagccaatacagaaaatgatggttttcgtgaggtgatttcggcctatggtacgagtgtcgttaatttgcgtggaggtaactataagaactaccaacagaaaaatggtcagtatgatttgatttatgcaagggataatgcagtagtcaatatctacggtggtacttacgaatccggcggttataatgacagaggttattgggtgctgaacctaaaagacaattctgctgctgaaatcaatgtgtatggtggttcatttaaaaactttaatccgtgtaaccacctttgcgaaaaccccaatgccaactttgtggctgaaggctatcaagtgacatgtgacggaaaggttgccacggatgcacatgatttattaagtggagacaagacttatgtagttagcaaaattgcacaatagctgttgagtaataataaatgtcaggtataggaaaccgtttcgttcgtcaaggcttcggaacggttttctttttttcataacaaatgatattctatcatgaaaatcaatccaaacttcaagctccgcgaaatggccggagaaaccatcatcgtgaatcagggacatacgggtgccgaccttacccgcatcatctctctgaacaaatccgcgcgtctgctatatgaacggctggcagacaaggatttcacaacggaagatgctgcgaaaatcctgatggacacttacggaatagacggacaacaggcattgaaggatgccacagcctggatggaggcactgaaaaaatgcaaggtaatcgaatgaaagagatcacactgtacagacacgagcggatgctcttcgccctgctccgggcctcgctgcacgagcggaaaacagaaatcacacttttcctggacagcactgacgaggagtggaaacaatgccaccgcctggccgtaagtcagggagtgatggcgctggcatgggacggtgtgatgagactaccggcggaactgcaaccgcccctttccgtaaagctggcatgggcagccgctgtagaaaggtacgagaaaaaatatcttcactattgcaggacggcagatgaactttcccgcttttatgcgcagcatggcatatccgccatgcagatgaaaggcgtgggactctccgcaatctatcccgttccatgccaccgcgagggaggcgacatagacatttacacctattcggcggacaagagccggatgagcgacggggaggcgaacaggttagcggacagcctgatgcggctggagaacatagacgtggatacggaacattcccccaagcacagcgtattctactacaaaggtgttccggtggagaaccacaagaccttcctgaacgtggagagctataaggcggccggagaggtggaaaaggtgctgaaagaacacatgaacccgcaaccgacggaattggacggaggccgggtccttaccccctcgccgctctttaatatgctgttcgtcgctttccatgccgcccagcattacgggagcagtctggtgctgcaccatctctgcgactgggcgtgcctgttgaaaaaacatggcctacacataccggcaggcgtcaccgatcgccgtttcctgcgtttcgtgtcggcactgaccctgttggccgacaagctgctggagatggatgtcatggtggctgacgtgcaggagaatctggcacggaacatactggaggagatgctccatccgcgttacgggacaaaggtgccggtcaaaggcagagccggcatcatcctctacaaggcaaggaggatggcacacctcactgcactcaggcgtgaggtattgggtgcttctgtatatacgacgatactgcattcggtcatcgcgcatatccgagagccgaaaaccatattccagcgaggtacggagcaatgacactgaagagaatctggcatctgctgcaacccgaagagcgcaggaaggtatggaagatggcagggacggtgtttttctccgcactgctcgatttcgtctccctggcggcactgctgcccgtactctatatcctgctggaagggggcgaaaaccggcgggctgccctgctgttctgtcttctggccataggggtcatcgttgtcaagagcgtgctggcaaccgttttcacccgttaccaggacaggtgtctactctctttctaccggagactgagcttctcgctgttctccgcgtattaccgccgcggactgctttttatccgggagcgcggcagcagcaggctggcatacgagaccaacgttgtatgctactccttcagccacggcctgctctcctccatctgccgcatggcgggcgacgtgctgctcgtcatgctggtgacggcagctttactcgtgttcgacggcatgtcagtattgctactgtatgtctcgttcctcccgttcatgtgtacctatctcctcgtggtgaggaaacgggtcaggaaatacggcgaggacgatatgcttgccaagcgggagcagtcgagaaccgtcatggatacattcgggggatacatggaattggaggtgagcggtgctttccccgtctctcagaccgcctttcttaaaggtctggacaggataagccgcaaccgcatgaggcttgacaccgtgctcggactgccgctcttcctttccgaactgtcggttgtcatcgcacttggcctgctggtggcttccggggacggaaacgtgaagatggtggtgggtgtttttgccattacggcattccgcctgcttcctgccctccgcaccttgttgacgggatggacgcagatacagaacgcggcatacagcctgaatacgatagaggaagggctggcaggaccggcagaggcggtcagcacatattccgaagaaataccgttcgaaaaggagataaccgtcaggaggcttgcatacacctatcccgatggcgggccggtgctggataatttcaattgccgtatccgtaagggggagcatgtcggctttcggggggccagcggtgcgggaaagtccacactgttcaacttgcttgcaggtctgctcgaacccgattcgggagagatacggattgacggggtactcctgaacgggatgacacgcgcttcctggatgaggcggctcggctacgtcccccaggaggtgttcatctttaacggtacactggccgagaatatcgccttgggctatgggacgattgattacggcagggtgaaggaactgttgggacaagtctgtctgggcaggtgggcggaagcgttgccggatggcatggacaccctgctcggtgaagcgggtggaaggctctcgggcgggcagagacagcgtatcggcattgcccgcgcactttacaagcaggcggaggtcctgctgctggacgaggcgacatcggcactcgacaatgtgacggaaagggaggtgaacgaaaccctctgccaactgaaagaaagatataaaggactgacgatactttccattgcccaccgggaaagttcgctggcttattgtaaacggattattaccattggaaatgaaaatgaatagaacttatcaggttgccggacaccgcttcatgctatggggagacaaactctgcaaggctgtagaaggaattgccggatttaggccttttgaatcccaggatggcgaggtgctgttcgccttcatggaggataccgccgtgccggtgatggaaaacgtggaatataccttcggatacgaggatgtcaggggctttttcggacggacggtcaagggcttcatgttgaagctggagccttccggagggaatgcgctgtatctgtggtgtaccgacggagggaatgaggtgtggatatgcggcaacctttcagcacgtctgtaccgcttcgccttgtgggtgggctatggactgatgacgcttccgtacggcaccatagccgtccacagcagttgcatcgtttaccgggacagggcggtattgtttctcggtgagagcggaacgggaaaaagcacccatacacgcctatggagggagcatgtggaaggtgctttcctgctgaacgatgacagcccggtgctgcgggtggaagacgacgtcgtgcgggtctatggaagcccttggagcgggaaaactccctgctacaggcaggagtgttataagctggaagcctgtgtgcgtctttcgcaggctccgtataaccggataacaaggctgtccgtattgcaggcttacggggcagtacacccttcctgcccgccggaatttgcttatgacaacggtttgtatgaccatgtgagcagatgtgtcgacaagctgctccaggctgttccgttctatcacctggcgtgccttccagaccgggaagccgcacgacttgcctgccggacgattttcaaggatacgatatgagaaagattcccaacgagctgttcttttcccgggtggaggcggaaatcgccggaggacgccccgtccggttccgcctgaaaggctggtcgatgttcccgttattgcgtgacgggcgggacgaggtggtgctgtacccctgtacggaggatgaacttcagcctatggacgtggtacttttcagatataacggaagacacgtgctgcaccgcatcatcaagagggaaggtacccggctgtacatccggggggacggctcttttgtagcccgggagcagtgtacggttgccgatgtggtcgggaaggtacgtttcgtcatccggccgtccggcaaggtactgtccgtaagcagctggcgctggcgattgccgggcatgctgtggagcaggatggggatattcaggaatccgctcttgagaatcctgcgctgtctggcagggtgacctgacagatgtatacatcagggctgcaagcgggaatcgaaaccgtttgcagcccgcacttatttctttttcttatgacaagggagtgcttgccacactgcctgatgttacattaccacttgaaatgttcacatacccgctttggccgacggctataaccgttttctccatcacataactattgaaatttcatggaacgatcggttaagacggttaccgaacaccgtcaggcccttgtcgattttttcggtggttatctttgtgtacttttgggtggtggttatgttcgtgtgccccaatacccggctcacactctcaatggggacacccttgctcaaagccagagttgcgaatccatgacggcttgaatggaatgtttttagtaatcccgcactcccttatcatctgcttcaacggcttgcagattgaccagtagtccaaattgggaaacacgagcccgttctcttggaacctctcgtaacgtctgatgatctgcatgggaatatccagcagtttcacctggaaattcaccttcgtcttgtgccgcttcgacaatattcatttctcaccgttcacttccgcaatgtcatcggtggtaagttccttcatatccaaaaagagagggcggtgaaactggcgaagacaaacagatcccggatataagccagcttcctgtttgcaaactcgtgcgtcattaccgtcttgatctcatcttcggtcaaatattcccgttccttgacgttctggctgacgcggtactgggcaaacggggttttctgtatcagcccgttgtaatggaccttcgccacgattgttttcaaccacatacagtttgaccacacgctggcgttatgaagtccggcatcagtggagagatagatttcatactccttaatgaagtcgggggtaagctcaagcatggaaatgtcattccgcctatggcatttctttatgaacgtcaccagatggtttcttggccttacccgcactttgtatgaactcaacgcccagtctatgccgatacgcttcttgaaactctcgttgtccttgtcgaacgcgccgagcagtgtcttgtattccgtaccgagtccctgaaaggcgttgcgtaccatttcggccgtaacgaacgcttctctatcagagaggcgttgataatgtctgatgatttgggccttgatgttgtcaagggcgagattgatctcccgcgcttccctgctcttccctttcgcccggttgcccttggcgtcccatagccctttggcgatagtctgcttgcaactgaactgggctacggaaccgttgattgtcacccgtcccataactgggacaataccgtttttctccttgttgccgttcacgtagaacagcactttgaatgtaccggttaccgggtaatgatttgaaaaccattcgctctcattacctttcgtttccctgcactttagcattggagaggtcttcatcggttttcctcataagtcattgaacatcagttttgccatcatcatttattcgtttctgattgatttttccagagatatgtaatatatttgtacacacatcaatgattttaaactaaaagaaaaacaatatggataaagattcaaagcaagtagtggttcttctgacacatcccaatataaaagagtcgcgagctaacaaggcattgatggatgctattagtgacatggaagaggtggccatatacaatttatatgagatgcatgtggaagatgcttttaatgcagagatatggagcactatcatatcgcatgcatctgcgcttgtatttcagtttccgttctattggatgtcggctccttctttattgaagaaatggttggatgaagtatttacatatctggcaaaaactcctgctgtggctggtaagacattgatggtggtcactactgccggctctgaacatgatgcttatagaagcggaggaagaaatcgttttacggtggatgagttgttaagaccttatcaagcaagtgctgtacatgccggaatggtatggcaaactcctcttgtagtctatggaatggggacctcggaagctagtaaaaatatagcagaagggataaattgctataagcaaagaattgaagcattggtgaagaaagacatttccagtgataattggtaatagtaggaccatatcgaaatggaacatctttttcatttttgaatgtttgtttttctcttcatatttttctaaaatcctgattttaagcaataaataaaatattgtatgagttggcatatttcttgtgttaactcatacatgaaactttatattatatcaaacagattacccgttaaggttaccaaagaggatgaaacgttcgtgttttcacgaagtgaaggcggactggctaccggtttggactcacttcagatttcctacgaaaaacattggattggatggcctggaatatgcgttgacaacgaagatagtaaagaggaaatcacttctagattggaaggaataaatttccacccagtattcttgtccgaaacacagataaagaattattatgaaggctatagtaatagtactatctggccattatgtcactacttttttgtttatacgctgtatcggaactctttctggcaatcgtatcaggaagtgaaccagttgttctgcgatgccatttgccgcgtgatacgtccaggtgataaggtgtggattcaagactatcagttaatgctgcttctcggaatgcttcggaaggtttacccggatttgaatatcggatatttccatcatatcccttttccttcctatgaacttttccggatattaccggagcgtgcagaaatcctgaaaggattattgggtgctgactttatagctttccatactcatgactatatgctgcattttatcagtgctgtcgaacgggtattgcgtattgactttaaactggacgaagcacaactcgggaatagagtagttaggaccgatgctcttcctatgggaatcaactacggactgtatcacaatgcttcttccagaccggaagtacggcgggcgatagaccgtacacggaaatttttcggaaatcataagttgattctttctgtagaccgcttggattatagcaaaggcattctgcaccgtttatggggatttgctgcttttttagaatgtcatcctgaatattgtggaaaagttacattggcaatggtcattgttccatcacgtgaccatgtagatagttatgctgagctaaaaaccaagattgacgaagaaataggttctataaacggacagtattctacgatggactggactccggtttgctatttctatcacggtttttcatttgaagaactggtggcaatgtactatatagctgatgtagctttggtaactccacttcgtgatggcatgaatttggttgccaaggaatatgtagcttcgaaaaataataatccgggtgttttgattttgagtgaaatggcgggtgcagctattgagatgacggatgcattgttgattaaccccaatgacactgaggagataaagcaggccatttgtcgggctttggagatgcccgaacaggaacaactgaaacgcttgcaacacatgcagaaaattatttccgtacaaacggttaataagtgggcggcagactttgtaagtgaatggagcgatacgtgccgtaagaatgaacagcttcgtaagaaaaggatatctgttggtattattggtgccatcaaaatgaaatataaccaggctaagcaacggcttatcttgctggattatgacggaacgttggcgtcgctcaagacacgaccggaaaatgctaagcccgcccctgaactcattgccacattgcagaagctggtttccgacccggccaaccatgttgttgttaatagtggtcgcgaccagtttactttagaaaaatggttgggaaatttacctattgcaatggctgcggaacatggtgctttctataaggaaaatggcatctggcacaaaaacataaacaaagcggaatggagttccggattggtgtccatcttgaagctttttgtcgaaaagacacctcgttcccaccttgaagtcaaggaaacgactttggcatggcattaccgggaaagtgatgcatggttaggagctttgcgggcacagcaacttatcaatgtgctggttaacatctgtatacagcaaaagctgcaaatcatacaaggagataaagtggtggagattaagtctcccgattataataaaggttccgaagtgagacgccagttggaaaagaaacattatgactttatcatagctatgggagatgatactacggatgaagatatgttcaaagctttgccggtgaatgcagtgacaatcaaggtgggatatgtgtcggaggcagcaagctataatatgccatcacaaacggaagtcctgccttttcttcaaattctggcgaacaagaaagacatgaaacaacccattggcgagaatgtcaaaacgagcttgaaaggggtattcgattttttcagagacttgttaaaaacaaaatagtaaaaatgagtaatttaaattatggggtagtaggcaattgtcggactgccgcacttatatccgaaaaaggcagcatagactggttgtgttttcccgattttgattctccgtctatctttgcatcactacttgatcgggaaagaggaggaagttttggatttgacgttacagaagactatcatatctcacaatcttacgttcctcacactaacatattgtctacttctttttcttcgaaagagggagaatttgtcgtacttgattacatgccttattaccgttcctgcgaaaatgcccattatcttccggcagaattgtatcgatatgtgaggtggataaaaggtaagccccgtttcaaagtaaactatgtccctgctcccaattatgcgcaaggtaaagtgattcataatgtcacttctgaatttatagaaagctattgttcttctgataataaagatagacaatatttgtattcttcccttcctttgcaggacatcgaacagaaaaaagaaattatattggaaaaagatgagttctttcttttgtcatacaatgaaaaggtcattccggtggatattgaacgggaaaaaattgaatattgccgtactttggtttattggcttaattggaccaaccgtactaagaaatattctctctataatgatgtgatagaaagaagcatgctggttttgaaactgatgtcttactataatggagccgtactggccgcccttactaccagtttgcctgaatccgtcggcgaagtacgtaattgggattatcggttctgttggttaagggatgcctccatgtctatcgaaactttgttccagataggccatataggagcagcaagacgttttatgaagttcatacagtccactttcgtatccaagcacgaatcctatcagataatgtacggcattcggggagaaaggcagttgaccgagattattctggagcatttgtccggatataagaattccaaaccagtacggataggtaatgatgcttaccatcaaaagcagaatgactcgttcggttatctgatggatttgatttaccagtactatcggctgatgcccggtacattagacgaaatagaggatatgtgggaaatggtaaagagcattctttccacggtaatggaagattggaagaaaccagataaggggatatgggaaatcagaggagaaagccgccattttgtttcatccaaagtgatgtgttgggtggctttggaccgtggtgcaaagatagcttccatgctcaataaatacggttatagtgaacgttggcaaaaggaagctgacaaggtatggcaggatgtaatgacatatggatggaaggaagaacttcaaagtttctcgcagacttatgataatatggcaatggattcctctttgctgttgatggaaccttacggttttattgcagcagacgatatccgataccataagacagtgaaggctgtgaaaaaagctcttttgcataagggattgatgtaccggtataacagcgaagatgatttcgggcttccttcttcggcttttaccatttgcactttttggctgatacgtgcgctttttgttatcggagaaaaggaagaagcccgttgtttgtttgatgatgttctgacatattccaatcatttggggttattcagtgaggatattgattttaatacgaaggaacaactggggaattttccacaagcttattcgcatttggcattagtcaatacggctattctgtttgcagaagaaaataagagattggcttttatccggccgtaacgaggaggggaacttaattaatactgcaaatgggagcattttgtatttgtccttctttctttcgtttttaattccattgaatgatgatacctttctttttttatgtatttttgcataaataaaatttcactatttcggcagttgttttgtactcatatcgctgatatagtttagaaactcaaaataaaggattatcatgttacggaagattagactgacttttgcaatgatttgctttgtactcatcaccttgttgttccttgattttacgggaacgttgcatgggtggttcggctggttggccaaaatccagtttttgccggctgtattggcgctaaatgtgggagtgatattgtttcttgtaattctcactttggtatgcgggcgtatctattgttctgtgatttgccccttaggggtatttcaggatatactggcatggctgggctggcaacctaaaaaacgcaggaagcttccttactcttattctccggccttatcttggctgcgctatggcgtattgggtgtgtttatcattgctttgattgccggaattggttcattggctgctctacttgcaccctatagtgcatacggacgtattgccaataatctttttcaacctatatggcaatggggcaacaatctgcttgcttatctggctgaacgggcagacagttatgccttttatgaaacggatgtatggttgaagagcctgccgacttttattattgctgccgctactttggctgtgcttgttgttctggccggacgcaacggacgaacctattgtaatacgatttgcccggtaggaacggtcttgggcttcctttcacgttattcgcttttccgcatcacaatagattcggaaaagtgcaaccaatgcagtctttgttcacgcaactgcaaggcagcctgcatcaactttaaggagcatcagattgatgcaagccggtgtgtggtttgcatgaactgcattgagaagtgcaagcatggagccatttcctacaagtatcatcctttcggcaaacctgctgcgggcaaggctaattcggaacagataaacgaaacccgccgcagttttttcacagcaacggctctggttgcagccacttctgttttaaaagcgcaggaaaagaaagtagacggaggactggcagccattgaggataagaagattcccgagcgaagcactcccctcactcctcccggctcattgagtgcccgcaatatggcgcaacactgcacggcctgccagctctgtgtgtcggcatgtcccaatcaggttcttcgtccttctgcggacttaaggaaattgatgcagccggaaatgtcatacgaacgcggctattgcagaccggaatgtacaaaatgttcggaggtatgtcctacaggagctatccgcccgataatcaaagttgataaatcatccgttcagatagggcatgccgtgtgggtaaagaaaaattgcataccactgacggatggtgtgcagtgtggcaactgtgcacgccattgcccgacgggagccatacaaatggtgccgagtatacctgaagacaaggattctccaaagattccggtaatcaatgtggagcgctgtatcggctgcggggcatgcgagaatctttgtccggcccgtccgtttagtgccatctatgtggaagggcatgaaagacatcggattatataacaaagtagaatttctataagtatggaagaacatcataaaaacaatatgaaccgtcgtgatttcttgaagatagtggggattacagccgccacatctactgctgccctctatggatgtggttctaaggaagggagcagtgaaggtagtaaagcgttgggtcccattccgacggataaaatgacctatcgtagttttcccggtttggggagtgacaaagtttctattttaggatatggttgtatgcgctggcctaccgttcctgctccggatggaaaaggggaaatgatagaccaggatgctgtgaacgaactggtggattatgccattgcccatggtgtgaattatttcgatacgtctccgatgtatgtacaaggatggagtgagaagtctacgggaatagctctgaaacgccacccgcgcgaatcgttctatcttgccaccaaactatccaattttcatcctgatacctggactcgcgagggttccattgccatgtaccgtaagtcattcgaggatatacaggtggactatatagactactatctgctacacatgattggtggcggtggcatggagcaattccgcaaacgctacatagacaacggtatgattgattttcttgtcaaggagcgtgaagcaggacgcatccgccgtttgggatggtcgttccacggcgatatcgaagtctatgactatgccttgcagatgcatgaccgtggtgaagttcattgggattttgtacaaatacagttgaattatgtggactggaaacatgcttcgggcagcaacttcaaggcagagtatctgtatgacgagctggccaagcgtaagatccctgctgtcattatggagcctctgctgggtgggcggctctccaatgtccccgaccatattgtggcacgactgaagcagcgcgaacccgaacgcagtgtggcgtcttgggcattccgttatgccggttctccccaggatgtactgacagtgctgagcggcatgacttatatggaacatttgcaggataacatccgtacttactctccattggtaccactcacagaagaagaaactcagtatctgtatgatacggcagatttgatgatggagtaccccaccataccttgcaacgactgcaagtactgcatgccttgcccgtatggaattgacattcctgccatcttgatacattacaataaatgtgtcaatgaaggaaatgtgccggaaagcagccaggatgagaattatcggaaagcacgccgtgcttttctcgtaggatatgaccgaagtgtacccaaactgagacaggccgaccattgtaccgggtgcaaccagtgttctccgcattgcccgcaaacgattgatattcccaaagaactgcatcgtattgacaaatttgtagaacagttgaaacaagagactttataaaatggagagtatcattgacatactgcacaagggaggatactcttgtgttatgaagaaccgggaggaagtccgtactttcacccaacggggagtagcggatttgtatgatttgtaccaggcagattctgcatttatgaagggggctgccattgccgataaggttatagggaaaggtgccgctgctttgatggtactgggaggctttaaaacggtctatgccgatataatcagcactcctgcgctggcattgctgtgcgaagcaggaattgaaacgacttttgcccaagaggttccccatatcattaaccgtgacaagaccggctggtgcccgttggagacggcttgcatggagctgaatacggtagaggagatgtatccggtgattcagaattttatatcaagaatcagggcaaaatagcaacagcctgctctctttccctgattacctgatgcctttctcttccagcatcttgaagtcttccttgagcataccgacatcatccagtgtgcgggcttcattgtggtcgttcagatagactctgggtctttcgataaacagagcgctggtgacagataaagagtcattccggtatggggtctccactccacctatttccagcattgtctggaagaatgaggcactggaagatacattcttctgcctattggcttgtgcggcctccaataacgatgggtatctctgccggtagttgtcggacatccaaataaagaatggcacatgtatctgataataggaaggtaccggtgaggcatgcagaaagagatgccggttgtcatcgaaaatatcttctccatggtctgaagtgtatatcaaggcagaattgacatgttgtttttgaagcatatctatcagacgaaccagaaaattatccgtgtagcggatagaattatcataggcattgatcaggttgtctttgtatttcacttccgcgtcaacgggcatgtccggcaggaagaaagcctgctctgccggatagcgctctttataattgaaatgagaaccgtaagtgtggagaactataaattgcctggaaactcctttgcccagttcttttgctaccagtttcaacagtttgtcatcagaggggttgtaattggaatcccccacatcttctttaatgaaatcatacgtgtcggcttctttgccgaagaaatctataaatgagtggttatagcgctggttcgagaaaaaggcggtctgataaccggcttccttgaatgctgtgataatccctttttgataatagatggaatcaaaactggaagcactgaccggtgacagcaacatcggaacactcttgtgggtggtgtttgattctgtcagcacatggctgaaagctgtcagtccgccaatgcccgacagtcccgggttagtttcccgttcatagccgtacaaagcccagttgcatgcccgtgaggtttctcccaccaccattacatatacttccctttcatcagcctgatgagtacttctagcatgaaaggtaaaatctttagaggtcttgtgataattccgcgtttgggccgtccgttgaaaggcaagtgctatgttgtagcatacgttggcaggatacagttcggatttcagctcataccggtcatctgtcaaataagcactgcctaaggataatattccggcagacagcacatacagagtgcgacggcgagcttgccggatgaatgcttcggacagtctgcgtttgtgtacaatggatatggttgccagaattaatgcaggtatatagagcactaccacaataacgatggcaggtatcagattgtccagcagttccagcgcctcgcttgaattggttgtcaccagattcagaaacatatccactgcgataatggactgaccgaaaagatatagtaatacaagctggaaggctccgaagaagatgaacggaaatagcagccagaatgtcctgccacagtttctcgaccaagccattacagcataatatatagaaaggggtagcaggatattacatatctttgccgtccatgatatgggttctgtaaagcatagcactacattgggcactatcagaatgaccagaaacagatagaacaaatgttcctgattgtcgaaccatttttttatgtctctaaaaagcttcattgatattgaatataaatccggtctggtgtttgccaaaacctaaatccaaacgtacgtttactctctttttgaactcccagcggtagccgaaaccataattaggaagaatatgcctggcctccaattccgagaaattcgggaatatggttcccgcccctacccatacggcaactccatttcgcttccatacatgttggcgtagttccagctgggcatccattgcacacttgtcacggtagcgtccctcataatagccacgcatagaataggaacttcccaatgttgccatcagtccccagggcggatttccgtagttcagcagagtatggaactggcctgccaacaccccacccttccacacggactggtaatagctggtcgtcagttccgtattgctgaatgcgtatttatttcccaaaaaggccggactgaagcgctggtctatccgtaggtaatatcctttataggcatttgtcagaaaatcgcgtgaatcatacaacaaggaaaaccccaagctcacgttggtgctgtgcgctttcattcctttccataattccggtttttcaaagtcatgcccatacacgtaatcaaatgctgtcattgaaccgatataaaagttacgtgccatccggaacatgaagtccaccttaacctgcgcttgaaagcgatcgtattcactctcattgtcatcattggctccattgtcatatccttgtccccagtaaaggcttgggaaagaatagaaatacagattgtagttcaaccggtatttgtcttggggaaacagatggtttccacgtactcccagcaaatagaatcccaccgtggagacatccccatacagagagacattggacggagggagaatactatcgttccggtcggtacggtagagtcctgccgccaccagtccgattccaaatttggtgtcactggaataatgaggcccgcctataatgctgaaatcaaattttttgtttttcttttctttgttggcatcgttgaagtaattcaaaattttttcgaaaaaactgcgtttcttgagaagcgagtctatcggatacgtagaaattgagtccacagagttttttgcttctgcagggtgtgtttgtgcatgaacagccgtttctgtaatcagcatcaatattggtaatatccattttgtcaatttagtgtccatttgcttgtagaaaacttccgtggcaaagtttgttttatgttcttcattacaacaatgttacccttctttttgtttcctatttttctcttttatgttcatttctacattgcatgtggggttcactctttttaaccacatcatttatagagctttcctcagttatactgttattttaatattacaaagaacaacatgatattgaattaatgaaaacagcaatgaacattctcgataaagaggggcagaaacgatgggtaatcgtaggcggtggcttcgatggattaaagctagtacgaaaattgaatacttcggaagccttgttcaaccgaaccagatattggacagctttgaacaggcccagagtaccggtaataaagaagagcacaggcgtctgatgacctttgccattgtaggtggtggagctacggaaataaagttgtccgctactctggccgagatgagaaagtttgtcctttctcaaaactatccaggcttgaatatcaatgagaagcgtatcatcttgttggatggctcttccaggcttttgtctgccttttctgaaaagtcttccaaagaagtgactgattatctgaagaagcatgatgtggaaattaaattgaatcaacgggtgatgggatacgagaattatcagttggcattgaatgatgggaccgcaagcaataccaaaaaaaatgtattctgggtggccggtgtcaaagcaaacagccttcaaggattgcctgcctatggaccgggaaaccgcttgaaggtggacacttataaccgtctttctcaatatcccaatattttcgctatcgggaatacggcccttatgatttctgaggagtatcccaaaggacacccgcaagtggtgcaaccagccatccagcaggcccgcaacttgataaggaacttgcagcgtgcagaagcatgcctgccgctgcaaccgtttatatatcaaaacaaaggctccatggagaccattggccgcaatcatgccgtagtcgagcttaagaagctgcgttttggaagttttccggtatgggctgtgtggctgttcatccatttgatgagtattgtgggtgtaaaaaatcgtctttccatcttcgtagactggatgtggagttactttacctatgacctgtctttacggattatcatcaaacccttgaagcggcagtaaacttttattgagtaatatttgttatagttcatatacgaacttaaaaatgaatgaatatgttaaaacgacttttatttcccgtcaaaccggacggaacggcaacatctgctatgctattaattgcaagaattgtattcggtatattattaatgaaccacggtatccagaagtggactaactttcaagagctgtcggctgttttcccagacccattgggtgtaggcagcccgctgtctttaggattggctatcttcggtgaattggcatgctccatggcattcattataggttttctctatcgtttggctatgataccaatggtgtttacaatggctgttgccttttttgtaattcatggcaatgactcgtttgccacgaaagagctggcttttgtgtacctggtagtgttcatattgatgtatatcataggcccgggcaagtttgccgttgaccgttggatcggaaaggctctttctcaaaaagctcatagatagacacttctgttttactgaaaacagattttaagctcaaataggatgtattttcgtaaaaaatcctatatttgcggatgcttaaaataactcaatgagctataaagctattaaacacagtaaaataaaaaagagtgattatgaaaaagttcaatttgaagatggctgcgaccgtaatgatttgcggctcgtttcttttcagttcttgtatcggttcttttggactgcatagtaaactggtcagctggaatcaaggtattggtaccaagtttgtaaacgaactggtttatctggcattcaatattgtcccggtatatggcgtttgctatctggccgatgcattggtcatcaactccatcgaattctggagtggttcaaaccctatggccagcattggtgatgtaaagaaagtgaaaggtgaaaacggtgactacctggtagagacacttgaaaacggctattctatcaccaaagaaggtgagaccgcttctatggaactcatttacaacaaagagttgaatacttggaatgttgttgccgatggtgtcagcacagaattgctgcaaatgaacaatgacggcactgcacaaatgacccttccgaacggtgaggaaatgacagtgacactggatgcccaaggtgtggctgcagcacgtcaagcgacaatgattgacagctattacgcctttaagtaatgggataatggataaatgataatgggtaaatgtatatgctaattatccagtatcatttatccatagtcatttatatttttagaacggatatcccacagcaaagtggaaagcaaaatcgcggctaaatttaggatgaataatgggataacggtcttttttcttctcgtaagctggattgattgctttcatacctccgtcgaaacgcaatacaaagaaatctaagtcaagacgcagtcctaaaccatatgccaaagcaatctgcttatagaacttgtcaaatttaaactgacctcccggctggtctttataatcccgtattgtccagatattcccggcatctacaaagagagcccctctgaatttccagaataaccgtgtgcggtattcaatgctggcatccagcttgatgtctcccgactggttcatgaagttattatcgccggggaaagaaccgggccccaaatcacgtacagaccatccgcgcacactattggcgccaccggaaaagtagcgtttttcaaatggaagcattgttgcattgccgtatggaatggcgataccgacaccaaaatgaaatgccaatgaattgcggttgtcaatgaccaggttcttggcaaagtcaaaatcgcctttcaggtattgggcaaaaggaatgtttaataaagtgtattctcccgatgcattcttcttcattcctccgagctttgccacagcatacaacaaattgcccgctgattcaaaattgaagcggatggtataggaatttccgatgccggaattattcatcaaagcctttccggcactgttataaatatagctatagccggtgcggacaataaaacggtcttcataattatatttgaggatgtagttctcgtctttctccagataatcctctttaaatctctggtctatgctgggcatgtacagataattgatgtccagtaaatcaatgcgatgctgcgaacgctgttgttgtactccccatttgtagctccatccggcagacgccacaatacgtgtgaattcaggccgcatctggtagttatattgcaagccgaattctgtagtagcccttatcctccgtttgaaatcgctggatacaaagggaaacatgaactgtggaaagttgatagttgcttccgcacctaattctatatagtcttgatttaaggagctctgcaaaccagacacagcctcgtatgccccacgtagcttgaacatgaatgtttcggaacctttgaacatgttgcggtgctgaaaagccactgaagcggcagctcccaagtcgccggcagagtttgtgccttccacttcaaaggatacggactgatgcttgcctctggtcagcatcacataggcgttgagctttgcactgtcactctgctgtacttcgaaaaaacggatgttggtgtatttcagggcttgcaggcgtccgtagttggagtaggtgcgctgcacgttttgctcattatagagagttcccggaatgatgcgcagattgttggtcagcactttgggacgcagataaagcttgtctttgtagtagatggggaatcctttgtagtgcaatgaatcatttacctcgatgctgttcaaggcagatgcctgcaacacattatagtctgtaatgaaactcactttattgatagtgtactgttggtgattctgcggtgtatcctcgttgtgctgcttgtatggagccaaatgcaacgtcaaatctaccaggtaagaattgcggacagtatctgcggtataagagatgtactctttattgaacttataatatccgttctgaagcagtttgttcgtgatacgctgacgttctgcatccaatacattgacatcaaaatacatgccttcggataagagggttactgcagaatcctgccgcatgtattcctttattttactgtcccggatatcatatttcaaggtacgcactttatagggtttgccggttgtcaccttatagactaacctcatctttttctttttgacttggcgtatcggttccaccagagcacccatatagcccatattctgcacagctttagtgatctcttccctggtccgattggtttcctcctcactgtatatgacaggagcatcccctaatttcctcaatgtacggtttatccagcgtgtagagtcccgtccggaccagttgtagacatacaactgggtctttatcagactgaaccacttcgcattgggattctggcggatatacatggagagattagatggttttacttccttattgtcagtatgtatacgcacttcatccagcaaatacgagccgtccggcacatatttggtagaagaacaggaagccaacaaaagtacgatagtagtaagtatcgcgtagcggaaacctttatccataccgagtcattaattgcgcataaacagctacaaatatacttgtatttttttgttcccgaaataaaaaacgccggaagagtgcagagtttttgattatattgaaataatcacgtatttttgtcaaatgataacatgtgtatcctatggcattaagtaaaaaccgcattaaatatatccactcgttggagcagaaaaagaaccggaaggctgacaaggtatttctggcagaaggacctaaactcgtaggggatttgttgggacattttccttgtcagttcttgctggcaacttcagaatggctttcccggaaccgccctatctccactgtaacggatgtcacggaagtatcggaggaagaactttcgcgtgccagcctgctaaaaactccccaacaagtgctggctgtgttccggcagccggatgaggagacggatgtttccgtcatcagccgctccctctgtctggctttggatgatgtgcaagaccccggtaacctgggaacgattgtccgccttgccgattggtttgggatagagcatatattctgttcgcccaatacggtggatatctataatcccaaaacagtgcaggccacgatgggaggtatcgcacgcgtcagactgcattatactcccctacccgagctcatccgctcactgaaggatattcccgtttacggcactttcctggacggagagaatatgtacggacaaccactctcgaaaaatgggctgattgtgatgggaaatgaaggaaatggcatcggaaaagaagtggaggcactcatcaaccgcaaactatacataccgaattatcccgccggccgtgagacctcggagtcgttgaacgtggctattgctacagcagtagtttgcgctgagttccggcgccaggcagcattgtagtaaaatcaaaagggaaaaacaaccagggaatcaaacaagacaattcttcctcgataaccggagggattgccgtcagtatattgcagcacgtatcaaaatgaggatagtctgtttccgcctccgtaagcaaagctatgacgcctggtagccattccgtattctccacctcttctgtcaatgggaagatacgtgatacacactgtccttcacctatctccaccacatattgtttcagatagccatgtccgggaagaaacagaaaatgggaagcgtagcgtttcatgctttcggacggggacgtatggttctgggagttgtggcattttcctgctcctgaattttcagaggcttcaatttctctggtttcccgatactgtctttgcgaagggagtctgtggcctgctgaaggctgtcctttggggcaatgaccagactgtccgtggcgtgatagcgcatcagtgagatacggtctgccagcaaaggctgtggagtctcctgctgcgggtaatagatgaacccgcgtatttccttgatttctcctaaggtatcggcaaacaaggtgagcgtttccacacctgtgccttgtactttccgaatggcactgatgacactgtcattcttctcataaagaacctgcatcaccatcaacggagcatgtatgctgtccggtgcaccgttgtgaaaacggaagcgtgcgctccagcgcaacgtgtcacggtcgtggaaattggtgtctgaaggcaacgtaaacgttatcttgttgtccaggggcatgcccgtcaactgatagatatgctgccatatccacacgtcgatactgtctccgggaagtgattctttcggcttgttgtcacgcagggcaatcaagtggttgataccgtctctttcggcttttaagcgtacattcactttctcgtagattttggtaagtacctccggattacgggcaaaccagaccatagaagagtcgaaatcggcctgagtgatgccatatttcttgaaaaccgattcaatgtaaagaacccgcttatagctttcgttatacggtacttcttcacccatagctttggctatgtgataatcgtaaagcacgttttccatcttggcatccggaaggacggtctcaggtcttttcaccttacaagccgtcagactgaatgccagaaggactacactacaccattgaattcgatttattcctttcatgatttctttatggctgcgtgataggcatcattgaaatccttattatagaacaacagcaatgcaatcataccacagctgattgctgcatctgcaaaattgaatatcgggctgaaaaaaataaagtgttcaccaccgacgaacggcatccatgtgggccagtttgtatctatgataggaaaatagaacatatctaccactttgccgtgaaaccaggaagcatatcctcccccttcaggcaggaaagaagctatctgcgaatgagtgctttcattaaacagtacaccgtaaaagacgctgtcaataatgttacccaaagctcccgtcaggactaaagacacacagacgatgaatcccgtcttcattcccagcttcacgaatttatgcagaaaccaacctatcaccgtcaccgcaacaatacggaacaaggtgagaaacagtttggcgaatatttccataccgaaagccatgccactattctcagtaaagtagatgtagaaccaatctgtgattcggatgctctcgtgccagtacatgtgagtcttaatccaaatcttgataatctggtctataatcaataccaagaatataatgagtaaggctatccgtcctttcgtaaagaatttacccatttttatttcttgccgttgtttttagcttcgatgctcagagtggcatgaggcactgcacgaaggcgctctgccggtatcagtttgccggtttcgcggcaaatgccatatgttttgttctcaatacgcaccaaagcagcctgcaatccttggatgaactttaactggcgttgggccagacgtgtggtttcttccttggataaggtgttggcaccttcttccagcactttgtacgtaggagatgtatcgtcggtgtcattgccgtctgcacccgtcaggctagcctttaacaattcatagtcacgttgtgctaactctaacttctccagaatgatagcgcggaattcttccaattcagcatctgagtatcttgtcttttctgccataacttttacgtgttaatcaggttagtatttaattattctttcactacgctcacgtacagcgagaaatcgtcgaagtttagttctgcaccattttctacgttgtctgtcagcgtcagtgaagttcctaaaacttggttacaaatatagtctttatattcgtttactgcatcatctgtttgaggattttttgataatgtaatctttattttatcggttatctcaaaaccgcttgacttgcggatattctgaatacggttcaccaactcgcgcgcaacaccttcacgacgcaactcttcggttacggtaacttccaaagctacggttagtttaccttcgttggcaaccagccagcccgggatgtcctcgctgaagatttccacatcggcagtttcaatcacagcttccgtaccgttcaggacgaacgtataggaaccgttcttctccagttcagcgatagcctcctgagacattccggccacggcagcagccacagctttcatctgttttccgaatttcggtcccaacttcttgaagtcgcatttcactttttttaccagtacaccggcagcaccgtccacaaacttgatttctttcacattcacctcgttcatgataagtgctttcacagcctcgatgtgtgcacgctgttcttcatccactaccggtatcatgatgcactgaagcggttggcggactttgatgttcaccttgcggcgcagtgccaataccatagaagtgacgtcttgtgccatctgcatgcgggtttccaattccttgtctatcatttcctccttatattcggggaacttggcaaggtgtacggaaaccacgttgtcgcgtcccgtagctgcaatcaggtctgtgtacagcatgtcggcatagaacggagcaatgggcgccatcagcttggctacagtttccaagcaggtatagagtgtctggaatgcagagagcttgtcctgcgtcataccgccaccccagaagcgtttacggttcagacgaacgtaccaattggagagattgtcgttcacaaactcagaaatgagacgtcctgctttcgtgggctcgtattcattgtagcaggtatccacgttcttcaccagcgtattcagtacggagagaatccaacggtctatctcagggcgttctgccatgggcacgtcggcttccttgtattcaaattcgtctacattggcatagagggcgaagaatgaataggtgttatagagtgttccgaagaacttgcggcgcacctcttccactccatccacgtcgaacttaagattgtcccacggagaagagttggtgatcatgtaccagcgcaacgggtcggaaccgtatttctcgatggtcgagaaggggtctacggcattgcccagacgcttggacatcttgtttccgttcttgtcgagcaccagaccgttggagataacagccttataagcggtgctgtcgaacaccatcgtggcgatggcgtgcagcgtgaagaaccagccgcgtgtctggtccactccttcggcgatgaaatcggcaggatatacctgatggctgtccagcagttccttgttttcgaacggatagtgtatctgtgcataaggcatggcaccggagtcaaaccatacgtcaatcaagtccgtttcacgtttcatcggcttgccgtctttggaaacaaggatgacatcgtctacgtaaggacggtgcaagtctatcttgtcgtaattctcttcggtatatatacccggctggaagcctttgtccttgtaggggttggactgcatcagaccggcagctacggatttctctatttcgttgtaaagttcttctacagactcgatacatttttcctcgctattgtcctctgtacgccagataggcagcggagtgccccagtagcgtgaacggctgagattccagtcattcaggttttccagccacttaccgaaacgtcccgtaccggtgctttccggcttccagttgatggtcttgttcaactctatcatacgttccttacaagcggtgctgcggataaaccagctatccagcggatagtacaatacgggtttgtccgtacgccagcagtgcggatagttgtgtacatgcttttctatcttgaatgcctgatgagcggctttcatcatcatgcagatttcgatatccaatgattcggcagcttgcgcagcctgctcattatacttgccgtctacggtgaattgagggtcataagcattctttacccacttgccctgatactccttatacaagtccacgttgacacatgcctttacgaaatcctcatccagttcatctatcaaatagaacttaccggtgagatccaccatcgggcgagtttcacctttcttgtttatcatgaacagggaaggtatgcctgcagcacgggccacaaaggcatcgtccgcaccaaaggtcggggcgatgtgtacgatacccgtaccgtcttcggtcgttacataatcacccgcgattacacggaaacctttatcgctggcagtccaactgccgtcttcggccacatctatcggctttacccacgggatgagttgctcgtactccatacctaccaagtccggtcccttgtattcacctacaatcttgaaaggtatcagcttgtctcccggtttataatcctctaatgcaatgccttccgcttttttattgaagtgtgcatagagcaatgcttttgccagaacgacggtcatcttctcgccactatagctgttgtaggtctgcacggctacatagtcaatcttaggccctacacagagtgcggtattgctgggcaatgtccacggagtggtagtccatgccaggaagtaaggagtcccccactctgccatttccggcttcgggttctttatcttgaactgccccactacggtcgtatcttttacgtcacgatagcatccgggctggttcagctcgtgcgaactgagtcctgtaccggcagcgggagaatacggttgtatggtatatcctttataaagcagtcctttcttgtagagttgcttcaacagccaccacaacgtttcgatgtagcggttgtcgtaagttatataggggttcttcatgtccacccagtagcccatcttgtgcgtcaggtcttcccactctttggtgaacttcatgacgtccttgcggcaggcagcattgtattctgccacagaaatagtcctgccaatatcctctttcgtaatgccaagcgccttttccacacccagttccacgggtaatccatgagtatcccatccggccttacgctttacctgaaatcccttcatcgttttgtaacggcagaaaatgtccttaatggagcgagccattacgtggtgaatacccggcataccattggccgaaggaggtccttcgaaaaacacgaaagaaggacaaccttcacgttctgtcatactcttggcgaaaacctggttttcgtcccatttctccaacacttttccgttcacttcggaaaggtcaagcttcgaatattcggcaaacttcttacccatcttgatatttactatttgacaatttacgattgaagaatactcttgaccagcatgttttttggtacatcaaaagccatcttctttattttaaaagtgcaaatttacaaaaaacttagatacaagagactttttaggtagaaaaagctggcttagtgcgataaaatgttttatttggcgtcagttcaatggatgtgtggaagtaatatccgcttgatgtgacctttctaagaaaagcactaaaacccacggggttctaagcaaaaaacggcaaaacgtaaatttagttcaaacaagcgacctgaaaactacaaataagagggctattttgctgagttcaacaaacggtatgtagaattctgcgaatgtcattgctgcaatcagcaataagcgtgcaaaacagcatgggaaagaataataaaatatcacattgaaaaaaataatagcagcatcatctgcgaatagacttcaactgccgctgatgtaactataattcaagatagaataattaaggaaatgattcaccactccgaaacaatccaatgtctcatcgaaagagagaaagtaatacatcaggttttcgggttctttcttttggggcaggatttcgtccacataggcaagaaaggcgttttttgatgctgtaattgcatggcggattttgagcattcaggcttcacatctccggtcagtcccccatcactataatattggcggcgctcttcatagacttgggcggctgcctcattgatttatggtgtaggcaggcttcagctattcttccttgctcttcttctgctgcatagtggcgtggaaggcaaaatagaggatgaagtctacgaagtaatagcggacacgttcataagtgacagaattgacctttatgtcagttttcaggaagcccaggatggagaattgcctgatgatgacttcctgccgggtgcggagaatacgggtttcctcctttacacgcgcctaggagtaatggaaaggcttatattaaaagcaatctgtttcaccgtatgccagtcggacagaatcagttcaccggaggccagacggtagttaagtaatcgcagcacattgatgcaaagaggtatttcggaagcggagaaagcttttttgaccattgtttcagtttttagagtaaaagttgtgtaaagacacgaataaactatggaattactatccgaaatgccacacttcagtaacttaaatgccacattttatcatccggaatgccataggtttcggactacgaaatgtggcacttgaggcggtaaagtgtggcatttaagttactgaagtgtggcatcgggtacgatgaaaaacccggcgtggaaaggttattttttcatcttcacctcgtacaaatcgcctctccggtctttcaagttacgtacactgccgtaggtatgcagctcgttcagcaaatccagatccacatccgatacaagaatcatttcggtattcggagtggcttccgcacgcttgccgtctgtggggaaagcaaaatcgcagggagtgaatacaccggactgggcatactgaatgtccatgttgtgcacacggggaagattacctacactgccggctatcacgacgaagcactcgttttcgatggcacgggcatgggcgcatacctttacgcggctgtaagcattctgtgtatcggtaaggaaaggcacaaagagtatctgcatgccttggtccgccatgatgcggctcagttcggggaactcgacatcgtagcatatcagcacgcctatcttcgcacagtccgtgtcgaacgtctggatggacttgcctccactcaatccccaagactttatttcgtcgggagtgacgtgtatcttctcatacatttcatagcttccgtcacgccggcagaggaatcctacgttgtatagcaatccgtcctccttgataagcggcatactgcccgtaatgatattgatgttataactgatagcgagcttgacgaaacgctccctgatttcctcggtataggccgccagtccacggatggcctgcgattcgccctcattgttgaattttgccatcagcggtgcattgaagtattcggggaaaaggacaaagtcactcttatagtcgctcacggcatccacaaagaactccacttgttcaaagaggtcatccagtgtcttgtaggtacgcatctgccattgcaccaagccgacacggacggtagttttggggcttacatagtcttgtgtgggagcctgatagtagatattgtcccattgcagcaggcaggcatagtgcttggactcctcatcattgggaagatagttgcgcatcaccttgcgcacgtggaagtcgttggagagctgaaaggtcagcaccgggtcgaagatttccttttgcttcaccttgtctatgtactccttaggacggagttggtcagcatatttatagtagttggggatacgtccgccaaacatgattgccttcaagttcaatgtttcgcaaagttccttgcggtattcatacatgcggcgtgccagacgcaggccgcggtattggggatgaataaagacttcgatgccataaaggatgttacccttcggattgtgggtattgaaagtctccttgcccgtaacctgagcgtaggtgtggtcgttcttcacatcatcgtagttcactatgatggaaagtgcacagcccacgattttctcgtcaaccaccgtcacaatctgcccctcgggaaagattcgtatcagcttttctatttgtttgtgtgtccagaacacatcgcttccgtctgaataaacacgcgtaaacgattgtgccaactggtcataatcttcaatctgcagattgcgtatctgtaccttattgattttcattgaatccataactttcttgctattcctgattaaaaacagtgcaaaggtacagtttatctttacatgttatctttccttttgaagatttttctttctcatcttggacagataagagtaagtattcggccaactacaggtattaaacctttatatacaacaatagcgactgtcactatgaacctaatagtatcagccgctattgttttgttgaacccatatgttacaatttatatcagttacaagattcctccttttgccttgtcagtacacattccggatgtttcaacttccatttatgtggaagtagattcaaaagttcttcttgggttgcctttttgtgataaggcatttgtgcgataacatcgttcaggtataccctgggatttaccccgtgcgccttacatgtggccagcagagaacatatgacagacatattaaccgcagcttcgtgattaccacagaaaagaaaattttttctgctcagagtgatgggccgttggacattttccgccagattgttgtcccagtacaggcggccatcgtccagacatctcataatattatcccatttggtataggcatatgttatggccttgcctgtcaaagaacttggactgtatttaattccttctgtctccatccataccttcattgcctccatgattggcctggacagttcctgacgcgtctgtctgcgctcatcatatgacaggccggcttcgtcacactggcgttctattttatagacatgctgtatctgagtcagtgcatgttgcgccatctccctgttttcatccaaagcctgctcaaaatgacggcgtatatgcaccaggcagttgagtagccgcacgtcggggttggtcttgaaggctgtttcataacctgcaaaaccgtcacattgaagatatcccttgaagttatattgatttgccagggattcgatgaccgctccggcccgtgatcccccgtcgtaatggaagatgaccagtttctccatgactgatcttaccatccagagatattccttgtcggctctgtgtttttctctgttaatgaccggaactgtagtttcatccgcctgtacatagtcacaggagaagacttcccatttgagttcttcatacagaggcttaagcagttccacggttttcttgaaccagccgtccagtgtactttcggtaaggcctttcattccaagatggcggtattgctgtatctgacggtagaacgggacatgatattcatacttctgaagcagtatctcggtaagcaggctggtgtcagcaatgcacttgtcgaccggcatcagcggcatgggagctatctctacgcctttctgtccggctggaggaagcagggtactatccttgagagcatatttgggacggatgatcaccttgacgtaaagcattcccggcttgtgtttgacgacttttgttatctcttcgcctattctacggtataaagacaagtctacgcctttcggttctattgtatcggtttccaatacgggcaagtcctctatcattttgcggttctgacgatttcgttttacgtcttccaccgattccttctcaatcttttccacagcctcgtcccgcttttcttccgcctgctgccggagtccggaaaactcgtcggcaaagaggtctggcatattaggatcatatacgcgaagtttctctgatttacgaccaaagagctgacggttcagccatgcgacctgagccgtcaactccttgatacgttcctgcagattttttatctgttcggattgattcttattagtagtagacaatgaggctatagaggcattcagcccttctatcgtcttgagtaaaatttctttttcttccattgtctatacttcttttaatgatgtaaatatactaattaacagtgaattatgcaacaatatccaaagtttactcacgcaaaaaacatgttatacatggtattccttacgttcggctcttaaccgccggagcctctgttccgggttttcctgtattccttcaaccatcatcaccagatcgcgccactccatgggatagctgtttgatttgggatcatactccggcagcttgaagcgaccggcctccagacgttttacatacattaccatacctccgtcttcggcatgaaggagtttcattagtctgcggctggaaccgatgaagatgaagacatcaccgttcctcacttcactgttcattttctcatgtaccactccgcatagcgaactgatacccttgcgcatatctgtcctgccaggacacaggaagtagcgcatcgtgtcgttcaggttaaacatgaccgtctcgaagactttgggtaaatatttccttcagcaaatcttcagaaccgctcccgaagtgggcacgaagtccattgggaaacagcagcgcaacaccatgcggcaattgttcttcttgggaagactccgtaaatgcctgtttaaaactgataggagccaactcgtgtttgatactgctcctgtcaacggaacattttctacgccagtagtgataggttgaataacttacacctatctgttgaaggtacgacttcaacggcagctcgctttgttgcacctgcaattctaattcttcaaattcttgtctgttcataataattgaggtttgattgtattcactgccgcaaagctacaaccaaacctcaaagtgtaaaaggtgcatttcttcgaatgcttacatttatatcagttacaagattcctccttttgccttgtcagtacacattccggatgtttcaacttccatttatgtggaagtagattcaaaagttcttcttgggttgcctttttgtgataaggcatttgtgcgataacatcgttcaggtataccctgggatttaccccgtgcgccttacatgtggccagcagagaacatatgacagacatattaaccgcagcttcgtgattaccacagaaaagaaaattttttctgctcagagtgatgggccgttggacattttccgccagattgttgtcccagtacaggcggccatcgtccagacatctcataatattatcccatttggtataggcatatgttatggccttgcctgtcaaagaacttggactgtatttaattccttctgtctccatccataccttcattgcctccatgattggcctggacagttcctgacgcgtctgtctgcgctcatcatatgacaggccggcttcgtcacactggcgttctattttatagacatgctgtatctgagtcagtgcatgttgcgccatctccctgttttcatccaaagcctgctcaaaatgacggcgtatatgcaccaggcagttgagtagccgcacgtcggggttggtcttgaaggctgtttcataacctgcaaaaccgtcacattgaagatatcccttgaagttatattgatttgccagggattcgatgaccgctccggcccgtgatcccccgtcgtaatggaagatgaccagtttctccatgactgatcttaccatccagagatattccttgtcggctctgtgtttttctctgttaatgaccggaactgtagtttcatccgcctgtacatagtcacaggagaagacttcccatttgagttcttcatacagaggcttaagcagttccacggttttcttgaaccagccgtccagtgtactttcggtaaggcctttcattccaagatggcggtattgctgtatctgacggtagaacgggacatgatattcatacttctgaagcagtatctcggtaagcaggctggtgtcagcaatgcacttgtcgaccggcatcagcggcatgggagctatctctacgcctttctgtccggctggaggaagcagggtactatccttgagagcatatttgggacggatgatcaccttgacgtaaagcattcccggcttgtgtttgacgacttttgttatctcttcgcctattctacggtataaagacaagtctacgcctttcggttctattgtatcggtttccaatacgggcaagtcctctatcattttgcggttctgacgatttcgttttacgtcttccaccgattccttctcaatcttttccacagcctcgtcccgcttttcttccgcctgctgccggagtccggaaaactcgtcggcaaagaggtctggcatattaggatcatatacgcgaagtttctctgatttacgaccaaagagctgacggttcagccatgcgacctgagccgtcaactccttgatacgttcctgcagattttttatctgttcggattgattcttattagtagtagacaatgaggctatagaggcattcagcccttctatcgtcttgagtaaaatttctttttcttccattgtctatacttcttttaatgatgtaaatatactaattaacagtgaattatgcaacaatatccaaagtttactcacgcaaaaaacatgttatacatggtattccttacgttcggctcttaaccgccggagcctctgttccgggttttcctgtattccttcaaccatcatcaccagatcgcgccactccatgggatagctgtttgatttgggatcatactccggcagcttgaagcgaccggcctccaaacgttttacatacattaccatacctccgtcttcggcatgaaggagtttcattagtctgcggctggaaccgatgaagatgaagacatcaccgttcctcacttcactgttcattttctcatgtaccactccgcatagcgaactgatacccttgcgcatatctgtcctgccaggacacaggaagtagcgcatcgtgtcgttcaggttaaacatgaccgtctcgaagactttgggtaaatatttccttcagcaaatcttcagaaccgctcccgaagtgggcacgaagtccattgggaaacagcagcgcaacaccatgcggcaattgttcttcttgggaagactccgtaaatgcctgtttaaaactgataggagccaactcgtgtttgatactgctcctgtcaacggaacattttctacgccagtagtgataggttgaataacttacacctatctgttgaaggtacgacttcaacggcagctcgctttgttgcacctgcaattctaattcttcaaattcttgtctgttcataataattgaggtttgattgtattcactgccgcaaagctacaaccaaacctcaaagtgtaaaaggtgcatttcttcgaatgcttactaaaaaaagagctgccgacagatttcctgccagcagctcttctcattttttatttatcaaatcctatcggactaaaacatcattgtctgtccaccaatcacacctgccacagcactcgctacggcaataataagtttcaaaatcacattccacgttttcttcataaagattatccattatctgattaataattcatagctactgttatcccagtggattctcaccttggtctccatccgaatccgagcctcctccttccgaaccggagccgccatctgtagaagtcttccccttaagataatcatccaaactcaccaaatccagcctctctccagcgcgggtagcagccttcgatatcttcagttccctattcgcctgaaaacagatacggacgctctccacactcttggctgtcacgtcatcagccttttcctcacctttcgatttggctgccagtataaaaacacccagcccggctatattaaccgtctttccttccagcaactgctctttcagcttttccacaaagttctgcatcgtactcttgatgtcaccgatagacagagaagagcggtcctgcatcttctgtgcaataaacgccaaatccacgctttgccccaatgttaccaactgcggataatacttcttgggagagttttcaaccctggggtccgacggtctctccaccgtcctgaaaattacactcatacttttttttctttagagatttaaattcgttttcctattcacacgtttcgttgatcaacgatgcaaaggtgaggattaaaaactatgtagccaaagaaaaaaggtgcttgggagtagtttttctgagaaaagtgataaagtgctataaatcaacaaaaaatatttctacaatatacaattcttcatttcatctactatgtatctcacatcctcatccatcacataaggaccgctcggcaagcaaagaccacgcttgaacaagccctcactgacaccattcacataggcaggattagccgcataaaccggctggagatgcatgggcttccataagggacggctctcgataccggctttatccaaacaaacacgcatggcctccacattacggttaggctcacaagaagtatgggcattcactgactcatgagtaacacccgcagcaccaccaacggcacctttcactgtctcacggtaggcatcctcctcacctctcacatgcagattcccgtcaagcagtaccgtgttcagccaatagttgctgtcataacgtccggaaggattctcatgaagcgtgattccctccacatcggccaacagctcacgatacagaccgcacagatgcttatggtgtgctatgtgctcatccaccaccgtcatctggccgcgaccgatacccgcacaaatgttactcatgcgatagttatagcctatcttctcatgctgataataaggataagcctcacgtgcctgtgtggcatagaacataacctccttctttgcctccgcatccggacaaatcaaggcaccgccaccgctggtggttatcatcttgttgccattgaaagacagcacaccatatttgccaaacgtaccacaaacccgtcctttgtacctactgccgaaaccttccgcagcatcctcaatcaccggaatgccatacttctccgccacagccattatttcatccaacttggctggcataccatatagataaaccgggacaatagcctttggtttcttaccagttttagcgatgcggtctttgattgccgcttccagcagctgcggatccatattccaggtatccccttctgagtccacaaacacaggagtagcacccagataagtcataggatggctcgatgcgcaaaacgtaaaactctgcaccatcacttcatcaccctgtcccactccacaagccaccaaagccaagtgtacagcagccgtaccggcagacaaagccaccacatgcttattctcacctacaaaagcctccaaatcctgttcaaagccgcttacgttcggaccgagtggaaccacccagttcgtatcgaaagcttcttgtatgaagcccatctccttgccgctcatgtgagcgaggcaaagataaattctcttatccataaaatatatgtgattattctaatgattcgatttcctcacgtagtggggaataaaaaggaaagaaaggattttataaatctttcccaagcactgtgtaaatgatgattttgatgtcattccaaaaagaccaactatccaaatattcaatatttatccgcactttgtccggaaacaaaaactcatcattatatttttgaggttccttctgttctgccaataattcttcctcgttccgatactttaaacttgcggggccggtaatgccgggttttaagagaagtattctccgatgctccccctcaagcctatcagcataaccgggaacatcgggacgagggccaacgaaactcatgtcaccaatcaacacattccataactccggcaattcatccaatttatatttccggagtactgctcctaacggagtgatacgactctctccttttacagaaatggaacttccagaatgggcgacagtcattgaacggaacttatacatcgtaaacaaccgcccatattgtccaactcttttctgtttaaatatgacaggacctccgggcatcttgatacgaatcaaaatgctgattataattaaaaccgggaataaaaagattaaaccgaagagtgatgcaccacggtcaaagagagatttgataaacattcaatcttgtaaaattatcttaaaaacttataagcaaattgagttacatgagggataggaataataaatataacaaaacgagcacaagcaaatatataattcacatatgataagttcagttttctaataacaagacatctatttttcaaatcagatagactttttgataaaccatttcttcttaaataaaaatccttatttacacgtacccgtaccaacacttcatctatattggcaaacttacatcctgataaaaaaccatttagccaaaatattgtatcttcatctttatccgtatcaacgggatataaacctgctttatgaaaataagattttctaaaaataacactcatatgtgccaatgggtttcttttcccaaagaaacatttcatttcatcatgtgatagaggatatcttataacccctatagattttttgttttcatccatttcttcaatatgtcctccacatatatctatatttttatgattgttcatatagattatttgtttttcaaatctatttgaaagacaaatatcatcagcatccatacggagaacgtaatcataccctttagatagtacaatagttaacaactcattcaatgaatatgccaacccataattttcatctctaccataaacatgaaaccgactatcatttaactccatgaagaagtgttctataccactttcaacaactccatcatattgaacataaacatgaaaatccttaaatgtttgttttagcaaactgtcaacacattgtgctacatatatcaatttatcatttttataaatcgacattattactgctaccattatttataatataacgagttaataccttacatgaattttgcatcggaatatctccccaaaatattttttttattctgttttgttcagtagtcaaactattaccataattccaatcagataatatttccattaatgaatcaaaactataggctcgaacacctggagtataatcatcaaaatcaaaagccaaatccctacattgacaaatatatttttcataatcaaaagggaataaaacaatacctttatccaataacaaataatcgtaaaaaatagaagaatagtctgttattagtaaatccgtaaatggtaatattggataaacatctacatccttatctaagaaacgaatgttagaaaatatacttgaaacattagatactacagtggcaggatgtaacttaaataaaaaaagttcatcacgtttctccaaaaaatcattcaataaatccaaattaatacctgaggctaacataaaatcagattggtcatctctgaaagttggcatataaataatagtatgggaaaattcttgtatatcctttatcagcctattaactccttgcggttcatattcttctacatatttctttattaaatttgcatttaaaaagaataactcacatctaggatatcccaaattaagacatttacgtatatctatttgaaagcatttagaaaaatgcattgacataaacactgaagtagaaaggaataaatcaggcttacgaaataaataaggaaataaaatacgattaaatatattttttacatatatcttagaatcaatgccaacagttgttgcaaactcaattttttttattccaacaccgtgccatagatttacagcaaagcatcctcccgaagtccaataattaatatctgataaatgagaagaaaaaatataatagtaggatgtcaaacaatgatatagcccatataaactccatctataatatgcattaatacctttttctcttaataacaatatttccgatttattagaagatatccaaataggaattactgttttctcatatttatataaatatctatataaatatttcacattgtccgtaaaacccactttatatcccaaaacccattttctcttacttcttggaattaagtatgaaagtaacaataatggatatcctagaaataaggaaattaaacgatatattatatcagtataatttctattactaaatacccattttataaaatgaagattattcatagtcagtctgttttacgtctgacatctataacttgtcccgtcaatccagaaagtaatgtcattattgaagtttctgcaacaaattggggacttaataaactattttccggttctataccaaagttttggatacgcataggtgttttagttctttccggattaatacaattaatctttatattataacttttccattcttcagataaagcctgaactaaattcacaattgcagcttttgaagatgaatataggctatacatcgctctgcctcgtgtatatgaactggaagtaaatagtaataaacctccatgagacttcgctaaatatgagaatgattccttcgctacatttatcgctcccaaataatttacacgtattaaatttaaaatatcatcatatttcattgtcatcaaaggaattttcaataatatacctgctgtatttataacgaaatcaatctttttctcaatcagatatactttttccaaagcttcttttactaatgatgcatcagcaacatctgttccagtctcacttcgactaaacgaataaaccttagctttcaatccggtacacagttctgcaatactatgtcctataccataacttcccccaaaaatgactataactttatgctctaatgcggtttcttgtccatataaagaaacatcacttacagattttaattgaaaaagcttatccaacaaaaacaaatcttctttatgcgttaacttcatattaaatttctctcccggtacaactcctattggtatatcaggcatatattttaaaacaaccccacaatcatcggttgttttaaaattaggatctaccaatgcacgtttatatgcttccctaataacggataatttaaatgcttgtggggtctgtccattgtataaaaattgtcggttaggaatatcctctatttcatgcgtattcagattcattttgataatggtatctgttgcaggaattgcaacatcaacagctccatacttacccaacatagtaatacaatctgatattattcttttagtaactaagggacgtacactatcatgaaatattaaattaatatcattctctgtagaagcataggcatttatagctgacaaacttgaataataacgttcacttcctccttgtagaattcgtcctactttcttaaaattattaatgcaacacaattcctccactttttcaagataattagggtgtaccacaattgcaatttcatcaataagcggatggttatcaaatacagaaatggtatgttctaaaactgtttttcccgaaactttaaaaaattgtttaggcattgtccctcccatacgagttccgacaccacctgctaaaattacagcaacatttctcatgctaatttctttattctaactaataatccaattaaaaaatagtaaacataaaacattcttacctgtaaccaagacaaaatcctcctcttaaaccctattacatggcaagtactacaatataataaaactgatttgtacctggagtcttgagttataattcgagttattgaaatagctttcttattgaatatggctattcgaggatatttataactcactgcattagaaacccaatcataaataatccaataaaaaacatctttaataactggatatttatatttttcatatatcacaaataattcattaacagtaaacaaaatatccaaatccttttcttttatagtattaataatactatcgttacgtcctatataataattatataacaattcatttaacacataaactcgtgccccttgtatcatacattggaaattgaacaacaaatcttcataaacaattcccgatttaaagttcaaccctctttgtcgtaaaaatgataatttatataatctgttacaggctgatgcgctaaagcgattattcagcttagcctggaccaaatattccttaccatctaacagattatttccccaatacgcaggatctctaactttttctatgcaatcctttatcaaatatcgaccaaaaaccactatatcaacctcaaatctctctattacttgcgataactcataacatgtattaggctctatagaatcatcactatctaaaaataaaacatattctcctgatgctatatttaatcctgtattacgagcttcacttaaacctttatttttctgatatatatatttaattctttcatcaaataaataactttttatgatattatcactattatccgtcgaaccatcgtttaccaatataatttcaatgtcctgaaaagactgtttcatgacactatctaaacatctgttcaaatatttttcaacattatatataggaatgataattgaaataagcataaaactaaatgaattttattttaagtttcggaacatatagaattaaactataaaaaaataagaatatcaaaatatttatcaatgaagggaaaaatgaagcacgaggcatatacactatattaggaactaatataaaagccaaaaacatgataacacgagtattacgaacacttttctcaaaataacgaataatatatccagctaaaaaactcattagtagaaatccgattaatcccaaatcccaaaactctccgagaaaactagaaccaactccctctccccccaagtatgcatccggtgctaaaaaataagtcaatcgatgtcctaaactattagtttgctccacaaattccatagattgaccttcaaaagttgatgttaaggataaaggatacaaaatatatggtaatccagtatttacaaatgttgatttataaaatatcatatatgcaaatactaataacgaaaccccttgttgagaaaaaaacatcataaataaatcagaatcataaccagtatcaacgtcccccctccggaactccaataatacttgtgacagaataatacacacgattgaaatcaataataatttgcctattttttgtttttgttgttcagaataaaatgaataataataccataataaaaatataataggtaaaaatagtttagaacgtccaccctttaaaacatctgcaattcttaaagcaaagaaaattgacgatatgataaagaacttctttttagaaggtttcgatgctaaaaataagcaatatgaaaattcaaaaatagatattgctcccgtcgtccatattggatatttcaaatttgcaatagttccatcatatacagctaaatatccatgctccaacacagctttaaactgaatcaaatatttaataaaagtacctggaacggagaatagaaataagaaagtagatattttatctagatacctcgaatattcaaaatttatctttctataagacaaatattttctacccatcaagcatccaagatgcataaatagcaatgaaaatgttaacaatattaatatttgaaactgtacgtttatagggaaaatgaaatcattatatttatctgcccatgtccaattaaacaaaccataaatatccaagaatatacgcgaataaataaacacacatagcatatatagaaaaagaacatacaaattgaatgttccactttcatgtatcgcagaaaaaagtgaccacaaaaaaatgagtaacaattcatattgtagtatattaattgttacatcattatatccaaatccaatacaaaataaaaattggagaaaatagcaaataataataaaaatctgtattacttgaaaaatggaatatttccacgtaaaacttatcatctaaataaagtattaactttacatatttgctgattcaaatcaaaatcagataatctatgccttaatttagtggatatcaacaaagaatgttctgacgctttacaaattgcttccgaaaaagaatttatatccaatgaagccacatatccaaactctccattacacaatacttcttcagcacctacacaaggagaggaaacaatatttctttctaaaattaaagcttctattattacagtcggtaatccttcatatagggaagataaaacaaatacgtcacaggattttattaaaggatatggattttctttaaaccctaaaaaatgtacataatcttgcaatcccatatcatctctcagtttttccaactcaacttgtaaaggccccacacctaaaatccataatgtaaaatttcccttgttcaacaataaaggcatacactcaatcaaaaatcgatgatttttacctttgtcaatcctacctacagccaataaatttattctatcccgactaaatggtacattaatatgtacatttgatttttgtataatatcagaaatatcaataggattatataaaacaatcgatttatttttgacagcagggcataaatttatcaatgtcttttgacaagctttagaaacacatactatttgatttaaagaaggaaggtcacgaaaatatctccgcttattagttgttttacagtaggtatgctttattaaatctgtatgtagccaagccactctttgcgcagtagcaggagctttaaataaaattctggtagcagtatcctctctaaaagcaatataacaatcgtatagtttccttatatgaaagatatagaacaagctaggaaacgttagtaaaatacgtctcttaattttatttattagcagatttgaatcccccaaagcagaatataaacatatattccgaggaacactatcaagataaacaccctctctatttatcctaagttcaagcggataatgcaacaggagtgagaatgatgacaatgagaagatacgaaaagaataatttttcagaggaacagagaaagaagatttctttcccttttgttcccctgtggaaaagttgtttctttgcatcttccagttccccaacattcagttgcaatatgaaacagctaaccgaagaacaaaggtataacatttccgcttatctgcaaagcggaaagtcaagaaccgagattgccaatcttgtaggagttcatcgtagcactataagtcgtgaattacgtcgtaatagtgataaacgtaatggcatttacaaaccggatctcgctcaggctaagtatatgtccagaatgcgttcacgaaagcacttcgtgaagtttacggacgacttgaaaattcaagtagatatactcataaagaaagatttcagtccagaacaagtgactgggtttatgcgaacaaagggcttggaaacagtttctcatgagacaatctaccagtatatttgggaagataaaaagcatggagataagttgttatacaagcatttaagaagacggggaagaagtcataagaagagaggtgcattgactaatggacgtggttttatcaaaaaccgcgtggacatagacaagcgtcctacgatagtagacaagaaagtacgttttggtgatttggaaattgacacagtcattggaatgaatcacaaaggagcactattaactataaacgacagggtaactggactagtatggataagactacttagcgggaaagatgccagcccgctaactaaagctgccatcgatgccttggaaccttttagagaccaaatacatacaataacggcagataatggaaaagaatttagttttcacgaagaaattgcacgtaaactaaatatttttgtttactttgcaaaaccataccactcgtgggaaagaggagccaatgaaaacagcaatggtttgattaggcaatacttcccgaagggtacggactttagggacataaccaatgaacaggtaatgcgcgttcaaaacatcttaaactcaagaccgagaaaaagattgggttacatgaccccaaaggaaaaatataaattattaactaacaatgaattcgacactgttgcattgtctgtttgaattcaggtattaaaaaaagatctacattatatttttttgcatcaagatgttgaagtattgttatcaatatcctttctgctccaccacctttcaaattatctataatgaataaaagattttttttcatgacctacttttatctttaatatataataaaattcctaagaaacaggctattataaaagtccatcttctatttatagcttctttatatatattcctaaaactttttcctgcaaatagactataacgcacataacttgcagcattaataacatagttagtaaatgataaattaaaataattcctctcatttatatacagagcataaccattaggatttcttaaacacagatgtctgtatttgctagacagaccatctctttgataatcttttatttctaaacttcgcttaatacaacatattttatatcgcaaagaaattctatttaaaaccaatgcttctgttacaaagaattcattctcaaattcagggaatggatattctttcaaaatacgagtataataaattaaccctttatctccttttactgacaatgaattgtaaaggttataatgtgaaacaaccaactcgtctacaggtagcgaagttcctattagatttccatgtaaatctaaagaattacatgaaaatcctgctatccaaggattatccttatgtatcaaatgatatgaataaattatttctagtgcagtttcaatataataatcgtcagaatctaaacaaataaagatttcccctttagctatctgcactgctctattaaatgcacgatgctttcccccattctcctgcttcaaatatacaatggaaattttatttgtatttatccatttctgaactatttcttctgtattatctgtggaaccatcatccacaataatccattcaaaactacgtaatgtttgtttacacaaatattcataggtacgtcctatagtattcgctctattgtaagtcggagtaaatacactaaagagaaattccatatttttccattaaacaattaacatctgaaaaaagtaaactattacttcttatccattcctcatccatattccaccactttaattttaacaaaaaatctatttgattctgctcaaagcgcattctaatacatttagccggtactccaccataaattgaataaggcggtatatctttagttacaatagaatttgctcctattactgcaccatcaccaattgtaactccatttacaatagtcacattagcaccaatccatacatcatttccaatagtaactatagcaaactggtcatacctatcttctaaaaggaactttccttttaaaaataacctcggagaagtcgtaacgttcttttctactggatgattacccaagccagctacgacattaggacctattgaacaaaactttcctatatggcaacaatgtataatagagttataatttacatatgaataatctccaataatagaattactgaaaataacgcgagctgaaaaagaacaatcacagcctataacagtatttcctaataattgtacatctcgtcctatattgacagtccttctcctaaagagtctcataaaccgatttatgaaattcatcatattataccatattttttacaataataccatctctgtaaagtttcaaagaaaacagatattaccaatgatatagataaagtatatatatttaaacaatcaataattcccaaaaacattattacgaacaaatacacgaacatactataaaacatattgacaataacatcttttacatgattgtgacttattaatataacagttccaagaaaataacttaaatggcgatatataaacagagttcccaacatccaatacacaggaattgccattagcatatcattattaaaaaataaaagaataaatgatttcaaagaacatccaacaataaaatataataaaactcctattacagtagtatatattaaaagtttacgggcaaatattttattagcatttttattataatatggaaatacaacattacttattgtataaaatatagtagataatacatttactattttttctacaaaatcataataagcaacttctcccattcccaaaacgctaccaataactatagtattagtcctatctttcactatacctgttattgacgttaagagaagtttggttgaatcttttgtatgataaaatatagtcgctaaagactgccatctaaacttaattttaaatttcctgaattcaaacagacaatgcaacagtgtcgaattcattgttagttaataatttatatttttcctttggggtcatgtaacccaatctttttctcggtcttgagtttaagatgttttgaacgcgcattacctgttcattggttatgtccctaaagtccgtacccttcgggaagtattgcctaatcaaaccattgctgttttcattggctcctctttcccacgagtggtatggttttgcaaagtaaacaaaaatatttagtttacgtgcaatttcttcgtgaaaactaaattcttttccattatctgccgttattgtatgtatttggtctctaaaaggttccaaggcatcgatggcagctttagttagcgggctggcatctttcccgctaagtagtcttatccatactagtccagttaccctgtcgtttatagttaatagtgctcctttgtgattcattccaatgactgtgtcaatttccaaatcaccaaaacgtactttcttgtctactatcgtaggacgcttgtctatgtccacgcggtttttgataaaaccacgtccattagtcaatgcacctctcttcttatgacttcttccccgtcttcttaaatgcttgtataacaacttatctccatgctttttatcttcccaaatatactggtagattgtctcatgagaaactgtttccaagccctttgttcgcataaacccagtcacttgttctggactgaaatctttctttatgagtatatctacttgaattttcaagtcgtccgtaaacttcacgaagtgctttcgtgaacgcattctggacatatacttagcctgagcgagatccggtttgtaaatgccattacgtttatcactattacgacgtaattcacgacttatagtgctacgatgaactcctacaagattggcaatctcggttcttgactttccgctttgcagataagcggaaatgttatacctttgttcttcggttagctgtttcatattgcaactgaatgttggggaactggaagatgcaaagaaacaacttttccacaggggaacaaaagggaaagaaatcttctttctctgttcctctgaaaaattattcttttcgtatcttctcattgtcatcattctcactcctgttgcattatccgcttgaacttaggtttatatattagtatatatatggctataagagatgtaataatagctccaatgccatttataagtggaaccaataaataatcttgcggtgtagtgacccatataaatatcaatagaataaacactacacgtcctatgaaagaaaaaattgcaatatatttcattttttctataccttgaaaaaaccatataggaaataaacattcataaatacattgccacattgaaaaaatatataataatttatattctcgaatttcaggaaaaagaaatattaaaaataagaatccaaatactataattaaaagcaaggtttttacaatatataccacactaactatttcgtttatcttctttgaatcttctctattaatgctaatatatttcgtagctgagatattaaatccccagtttacaaatattgctaaataactaactattgcctgagaatatatgattacaccatataaattttttcctaaagtattaattaaataaggatatgtaacaagtggtatcaataaattacatatctgtaataaagttagatagccaaaattttcaattaaggttttatacctatatatatagtcagatatatttttcactttgcaaattaacatcatcgtaagcactcaatcactttggactcttctgaaaataagtaagcagtcattttagacctgaaaaggtttaaaagtaagcactcaatacctttttccctactgaaaatcagcgagaaagggaattggtcttattatatttgacttcgatttaacttaattcaaaccgaaatgcctgatggaatcagcatttcgtagttcttgtttcctgacaatagttcacggaatacatgtataagatatcccttgatatccgagaggtacatcttggccgtttcgataatggtatagaaagtcattgccacattgacaccctcctcactgctgaagtgaagagaattatttcgcgatacggcaaagggacgtatcgcacgttccgccaccatgttgtctatcgtgtagtcgccccagtggcgatatttaagcaggtcatcccagccgttcaacatataagccaaagctgtctccatcattttaccgtagtgacagcgtttatcctgctgaagttccaatacctgtttcctcaagcctttcaatatctcactgacatcggatttatttcttcttttccttatctccccgagagtgagccgacgcatcaaacattcagcctctatcagatacaaccgcccaatttgttccacaaaccatgccgcctcttcgtctttggcgatgtctgcagcaagtttgaactttgcccggacatgagagatgaacttggaaactccctccttttgatagcgtttccataaattcttgaaatccgtgctgcttgccataagcattcgttttatctttatggcacaaaaatctagcatacggggcggtaaagcaaataaacaattgagtgcttaccgtccatatgggtaagcaataatacgttattttttgaatccggcaccaactctccctatccaaaaagcgatgcaacgccatccgcatccggatttcctttaccgaaggtatcagctggccggcatttatataattcataaactgagggacgaggtccgaaagggaatctcgtacagagtcaggcatcagcatgtgccattcacctttaacatcatcctcatatgtcagcacaagaccgaacttctagagtttatagggagttttgcgtattgcgtaccacgtatgcattggcaccgaccgtgacaaactcctcaagcaactgatgttccgccttgcaaagagaattgcagatggcagcaaggctgatattagaaccgtattccttatttttgatggtaaccatatttccaattttagaaaacaaaatcttccacaatatacctgtctacattacgcctttccttgctgaaattcacccccactttgacaagacgcctcccgtccaacctataaggaatcagataccctttttcatcaatctgccgtaaagcctcctcggcactgccgttcagtttaaactcaaaaacataaatggtatctttcgtcttcaccacggcatcggcacgaccgtgggcactacggatttccgtctcaacaaattgtcccatcaaagtgaaaaccacataaaagacagcctggtagtgacgttccgtattatcgctcaaatcgtatggcataccggcaaaaaacacccggagacgttccatgaaagcatccacatcaccggaacggagttcacgcataaacttggctatgtggaaaccggtttcatcatcggtcacttccgtataataaggtaccagaaaattcaagaaaccatagcgtacctcatcattgggaaaacccaaagtgtacaataaaacatccctgtcgtagtctttgatggtcagataaccactctggtaaatcatgggaagcgggttctttacttctgcacgatactcaaaaaaagcagaagccgtcacttcaactccctcaatcaaaaggcgcaaatcataatcactctttttcaacaagttagccaagtaggtaggagtaccggtctgaaaccagaaattatccaaaatcttcgacttgcatgcattcaacacactgaaaggattaaaaaccccttcacaatgagggtaaaaatgataaccgtcatacagcttcgtcatccgctccaaagttgtatcgaagtccatcccattggaaacacccaaacgttctatctccggagtaaacgttgtgagcagttcttccttagtaataccacataaagaagaatagtcgggccatgtactgatgtcctgcaactgatttaaatcactgaacacgctaatctgcgcaaacttcgtcacacccgtcaaaaaaacaaagcggagataacggtcggcacttttcagtaccccataaaaggctttcaatatccgacgatactcttccgttaacttttcatccgaaagagcttgaagcaaaggcttatcgtattcatcaatcaacactaccacttgcttacccgtctgggcatacgcctgctctatcacataggcaaaacgctcttcgggactacgctcctgcttttccgcaccatatttcaattcccacttttccagatattgattaagcatggctaccaaatctccggctgtttcatatttacgtgcattcaagtccagatgcaatacagggtattcctcccaccgggtttcctgtttttcgatggcaagcccgtgaaacaaatctttacgtccttgaaagtaagcttcgaaggtagatataagcaaactcttaccgaaacggcgaggacggctcaaaaaatagggagtggaattggatgctatcttatagaccattgctgttttgtctacataaagataattttcttcacgcagcttttcaaaagtctgtataccaattggcagtttacgcatctgttccatcttatttctcttttttagaagctatatgcaaatatacgttttttcttcaaagagaaatcctatttatacatttttattccatttcctcccatggataaggattatccaccacattctgaaactcgtcaactgcttcctgctgctcggcagtcagtgatgcaacactccaagaagcaatgatagaacggccttcgtcggccaaaggctcatcgaaaacctctccataacaagccgtaagcaagcggagtttcagcaaagaggaaggaagggaatcaagggtatcccagcaacgcctcaatacctcctgcacatgctgtagtttttcaccatggtcaatgaacgaggcactataccccttcaagagagcaagacagacatttgcctgctcctccaccgtggtgccccaggtgccggaattatacaaagttgtggtcaagcgatagacttcgctgttacgacgagacaaatcatcgctatagataggactaccgtccatacccaaatacatcagatcgtgcgcggcacgctgaaggaggagtgcttcttctaaaagagacatgagtagtaattataaattaaagactagcggattacttcaatgaggtctggatggatggtcgccatggcaacggcaatgataccttgtatagcaatcactacgcgacgatcacgggcaccttttacttttagaaaaacaccttcttgaccctcgaagtcgccaccggtgatacggactttcgtacctttggagagattcagttcttcgggttggaaatagagaagatggtcattgtaggtaccggcgacggctatgaaacgctgcatatcatggtcgggaatgactattttccgaccgctacgggtatcggtgatatattgcaaataagtaatttgagatttaaatcgctgtacttcggaaggacgtgcatggacaaaaaccaggttacggatgacgggaaccaaagcacggactttcctgcccctacggatacttatcttatattgcatgggaatgaaacagccaagatttgccttttcgagaagatgcatagcctcaagctccctgcggtatgtggcacgcatggcaaaccaaacttcggtctctttatccatttctattcttgctaattttacttagaaaaaggtattccttgggggctttgaactactattacagaactgtagttcaatcacttgcgagcattttatgggaagtttgacaagcactatgctcttcttgtcaacagattctctgcggttgttcattaccttttggtaagagactataaacgaacgtattagaaacaaaaaagcgttttttaatcgtacgtttaaaaaacacctatttcgaacttatacaagacatactcaaagagctaaaaataagaagattttaactgattacatatattgcatatactactgaaattcaatgcaatatacttatcattatttattattaggaacatttttctatcaaacattttgccattacaaaaaacgtctctatctttgcgttcattaaacgtacgtttttaaaacagcatatcatcttatatatcaaccatttacaactcacccttcacatttccctccaaaatccccttatttctccctcactttttatactttcgcattttttaaccagaataaaaaacagttaaacgaacgaagaattacacaaatgaaagaactcaaaaaaagaagcatctcaacagtaacgaacagagaagcatgtcgtatcaatctgatacacagaaaataaaagtaacaaaagtcaaagagcactgctccatagtgaacgaaaatctattgtcagaacgggtttactacggagaccagacccatgtttatgtaggttacttaagagcctttaaatcaggctattttgaaggaacaaatatcaagaaaattacagatatagccaaactattcgttgcttccgaaaacttcacaaagagaaccagaggagagcaaaagcctttgacttacagtacgataatcaccgaattggagaaggtatgggccatcataaaacaggaagacaccacactgattgacccatacggatatgatgtaaggataaatcactgatagttcagtacctggaaaggcagtaattttgccgccgtcagcaaccggacagaagggctacacctttcttgtcggatggtgtagcctcaacaaggcaagggcgtagccatccgtactgaaaggagtagccctttttcattgctgattatcatacatttactaaccctaaaaacataaaaaatgggaaaagaaaaaactgaatttgaggagaaatttgtatccaaaacagaaaaagcaaaaaagctatgggaaaaacggattacggaaaacacgacattgagcatggagtctgtacaatggatggcacaacgcataaattccctattggaatacatgcgatacggatatgcattgatagcctaccgaaagcaggacggcagcttctacatgggaagaggaacccttgtttcctacgaaagcgacttcaaaaagaaacatgacatgacaagcattaaagctcacgtagcctattgggacgcggaacaacaaggctggcggacttttctgattgagaactttatggaatggagaccgatagtaaactaacaaaaaaacaccaatatcaaaagctatggaggcttatttactacatgatgccaatgccggcagcaacctaaaattaatgattatgatacaagaagaaggtatgaaaggatatggcatttactggacagtgctcgaattcctcagattgcagaacgaatataaagccagcctgaaagtgattcccatactggcacaaaaagcaagggtgacaactgccacactgaagcgaatcatctatgactatgcgctgttcgaggtgaacgagacaagcttctcatcccccgaactaagccgccgcatggagccatgggacgcccaacaagaagctaaaaaggaagccggacgtcgcggtggactggttaaccagcagagaatcagggatgccaagacaagcagcgctttagcaaataaactaaataaagagaataaagaaaacccctctctatctccccaaggggagacgggaagaaggaaggaggagattcttctgactccaccggagtacacgctcaacagacagacgcataattaccaaggcctaatggaagaactggcaaggcagaaagtaaccgacatccacgatttgaatgccatcctgagactgacggattttggaaaactgggagggaaaatctggaaaatcctatatgagttgaacagctcaccccaactgaaagcccgcatcgtgatgcccggaaagtatatactgaaattactcaggggttagatttaataaaagaaatataatacttatctttgtgtccataacaaaacaccctaatcattatgaatctgaaaaaactattttttgcttccgccctgctctttgctgcatgcggcactatccaggcccaggaagtcattgcccaccgtggtttctggactacggacggctcggcccagaactcccttgccgcacttgtaaaggctgattctatccactgctacggctccgagttcgacgtttggctcaccacagacaatcagctggttgtcaatcatgacgccacctttaaaggcgtaactatgcaagatgccacagccaaggtatgcaccgccgtacaactggacaacggcgaacaactccctaccctgcaacagtatctggacaaggcaaaaagcctgaaaacccgccttatcctcgaactgaaagcccacaagacccccgaacaggaaacacgagccgtagagggtatcgtaaaaatgataaaggacaaaggactggaggaccgtacggaatatatcaccttctcccaacatgccaccaaggagtttatccgtctggcacccaaaggcacccccgtctactacctgaccggtgaccttacccccaaggagttgaaagcatggggttgtgccggtcccgactatcacttcagtgtcttccaaaaacatcctgaatggataaaggaatgccacgacctcggcatgaaagtaaacgcctggaccgtaaacgaagccaaagacatggaatggctcatcagccaaggagtagatttcatcacaaccaatgaaccggtagtgctggaagaaattttaaagaaaaaatagccgctccttatacatttagaaacaaaaaccaaacaaaccgcttcattatgtccgcaatggagcggtttcttgttttcaaaaagatagcaattagtcttataaaaaatcttttttcttattttgaatcaaactaaactttcacatggattacaatttatataaaaacaaagccatatgcttttaaattgaaagcctgacagtagatattctcattgaatgaaagtttcgctaaaaaataatagaaaatagacatgctttacagttaattataaaacaaaacgtcgtatatttgcatcgaaataaaacaaaaggatatattaaccaaccaataaaggataaaatgacaagagccataaaattcaccaagatgcacggtgccggaaacgactacatttatgtagatacgacccaatatcctatcagccatccggaagagcttgcgagggcatggagtgcaccgcatacgggaattggaagtgacggtctggtacttatcggttcttcggacaaggccgatttcagcatgcggatattcaatgccgacggctcggaagcccggatgtgcggcaacgcaagccgctgcatcggaaaatatctttttgactacggactgacctccaaaacagaaatcgcactcgatacactgtcaggtataaggatgctaaacctgcacttggcagacggaaaggtcaactctgtaaccgtagacatgggcatacctgccgacgaaccggcagactacgacggcaaaggagccaaaccgatgaaagaacagcccatcgaaatggacggagaacgatatgtagggaccaccgtatccatgggaaacccgcatctggtaatctttgtcaatgatattgaagccatcgaccttacagtcatcggtcccaaactggagaatcaccctctcttccccggacgcatcaatgtagaatttgcccagatattgggagaaggaaaaataaggatgcgtgtctgggaacgaggctcgggcatcacccaagcctgcggaaccggagcttgtgccaccgccgtggcagccttcctcaccggacgcgcaggaagggaatccatcatcatcatggacggaggctcactcaccatccgatgggacatcgccaccaggcatgtactgatgacgggagaagccaccaaagtattcgacggcaaaattgaattaattgactaaccaccaactatcaaccaagaaaagattatggcattagtaaacgaacattttttaaagctaccgggcagttatctgttttcagacatagccaagaaggtaaatactttcaggataacacatcccaagcaagaggtcatccgtctgggtatcggagacgttacccggccactgccaccggtctgcatcgaagcgatgcacaaggcagtggaggagatggctgacgcacggacattccgtggatatggtcccgagcagggatacgacttcctgatagaagccatcatcaagcacgattaccttccgcgaggcatccacttcggtcctacggaaatcttcgtgaacgacggagcaaagagcgacacgggaaacatcggcgacattctccgccacgacaacagcgtgggagtgaccgacccgatttatccggtctatatagacagtaacgtgatgtgcggacgtgccggagtactggaggaaaacggccagtggagcaacgtcacctacatgccttgtaccgccgagaacgacttcatcccggagattccggacaagcgcatcgacatcgtctacctctgctaccccaacaaccccacgggcaccaccctgaccaagcccgagctgaagaaatgggtggactatgcgctcgccaacgacacgctgattctgttcgatgccgcctacgaagccttcatccgcgaagacgacgtgccccactccatctatgagataaagggagcgaagaaatgcgccatcgagttccgcagcttctcgaagactgccggattcacgggagtacgctgtggctacaccgttgtgccgaaagaactcactgccgccacgctggaaggcgaacgcatcccgctgaacaagctctggaaccgccgccaatctaccaagttcaacggcaccagctacatcacccagcgagcggcggaagccatctacacaccggagggacagcggcagataaaggaaacgatagattattatatggacaatgcccggaccatgaagcagggccttgaagcggccgggctgaaagtctacggcggtgtgaacgctccttacatctggctgaaaacacccgacggaacaagttcctggcggttcttcgaacagatgctgtacgaagccaatgtagtgggcacaccgggtgtaggtttcggccccagcggtgaaggatatatccggctgacggccttcggcaaacatgaagattgcgtggaagccatgaagcgcatccggaagtggctgaaataaaaaaacaattgaattagcgaggtacttgttataatcgagtcggactgatcatccggaatttttctaaacttaaaggtaaaaaggtatgaaaacaagaagtgtaaaatgggtaataatggcaatggcgctattatcaatggcaatgcctttcacggcaaaggctcaggataaagtggaagcgtcggtaggcgtcgacctcgtaagcggttacgtgtggcgtggccaggatttgggaggggtaagcctccagccgagcgcatccatcgcctacaaaggtttctctctgggagcttggggctccgtaggcatcgagagttcggacacgaaagagttcgacctcatactgggatattcaaccggaggtttcagcgtatcagtgacggactactggtacaatgtgaccggagatggggtgacagccaaatacttccagtacggcgcacacaatgctgccaactcacatctgttcgaagcgcaaatcggctatgatttcggccccgtagccgtaaactggtacaccaactttgcaggcgacgacggtgttgacaaagacggtgaccgtgcttattcatcctacatctccgtagcagctcccttcacactgggcggactggactggacggccgagataggcgctaccccttgggccacggacttctatggagccaacggatttgccgtatgcgacgtcagcctgggagtatcaaaagacatcaaaatcaccgattccttctccctcccgttgtttgccaaagcaacctggaatccaaggtctgaaggtgcatactttgtagtcggactaagcttctaaaagcaaagaactatgatttacacacgccgaaaggcaaatagtaaatacagtctctacagactgcgtatggcccttgccatatcgctggtattcttcatgcagccgggctttgcactggtcgaagccggttttgcaagagtaaaaaatacggccaatatccagatgaagaacttcgttgacttcatgtttggctgtctgctccactggttcatcagtttcggactgatgttcggtgcaggcggattcataggaatgccccatttcttcgacctctcgttctacgacggaggcgggcttcccacggaaggtttcctggtattccagactgtattctacgctaatgattttatgttttattaaaccaacaattacaactctaaggtattatgtcaaaattgagattcagagtagtagaaacggcgtttaagaagaaacccgttgcagtggcagttccggcggaacgtccgtcagagtattttgccaagtatgtattcaacaaggagaagatgttccgctatctgccgagcaaggtgtatgccaaactgacggatgtgattgacaacggagctccgctggaccgcagcatagccgacgaggttgccgcaggtatgaagaaatgggcggttgaaatgggggcgacccactatacgcactggtttcatccgctgaccgaaggtactgccgaaaagcacgatgcttttgtggaacacgacggcaaaggcggcgtgatggaggaattcaccggcaaactgctcgtgcagcaggaaccggacgcttccagtttcccgaacggcggtatccgcaatacgttcgaggcacgtggctactcggcatgggacccctcctccccggcattcatcgtagacgacacgctctgcatcccgactattttcatcgcctataccggtgagtctctggactacaaggcaccgttgctgaaagccctgcgtgccgtagacaaggctgccgtcgacgtatgccactatttcaatccggaagtaaagaaagtggttgcctatctgggctgggagcaggaatattttctggttgacgaagggttgtacgccgcacgccccgacctgctgatgaccggacgcacgctgatgggccatgacagcgccaagaaccagcagttggaagaccactacttcggggctatccccagccgtgtggccgctttcatgaaggaactggaaatcgaagcgctgaaactcggcatccccgtcaagacccgtcacaacgaagtggctcccaaccagttcgagctggctcccgtcttcgaggaatgcaacctggcggtagaccacaacatgctcatcatggccttgatgcgtaaagtggcacgtaaccacggtttccgcgtactgctgcacgaaaagcccttcaagggtgtcaacggtagcggcaagcataataactggtcgctgggtacggacaccggtatcctgctccacgcacccggcaaactgcccgaagagaacctgcgtttcatcaccttcgtagtgaatacgctgatggccgtataccgtcacaacggattgctgaaagcctccatctccagtgcgacgaacgcccaccggctgggtgccaacgaagcgcctccggccatcatctcttccttcctgggcaagcagttgagccaggtgctggaacacatcgaagagagcaccaaggacgacctcgtcagcctcagcggcaagcaaggcatgaagctggacatcccgcagattccggaactgatgatagacaataccgaccgcaaccgcaccagcccgttcgccttcaccggcaaccgcttcgagttccgcgccgtgggttccgaggccaactgcgccagtgccatgattgcgctgaactccgcccttgccgagcagttggtggaattcaagaaagatgtggacgaactgattgaaaagggggagccgaaaatctccgccatcctcgaagtcatccgccggtacatcaaagtctgcaaacccatccactttgacggcaacggttacagcgatgaatggaaagccgaagcagcccgccgcggtctggactgcgagacaagtgttcccgtcattttcgacaactacctgaaaccggagagcatccggatgttcgagtccatcggtgtcatgacgaagaaggaactggaagcccgtaacgaggtgaaatgggaaatgtacaccaagaaaatacagattgaagcccgcgtgctcggagatttggccatgaaccacattatccccgtagctacacagtatcagtcggatttgattgacaacgtctacaagatgaaagacctgttccccgcagagaaggctgcaaaactgtctgccaagaatctggaactcatcgaagagattgccgaccgtaccgccttcatcaaggagcatgtggatgccatgatcgaggcgcgcaaagtggccaacaaaattgagagtgaacgtgaaaaagccatcgcctaccacgacaacatcgtaccgatgatggaggaaatccgttaccacatcgacaagctggaactcatcgtcgacaatcagatgtggacgttgcccaaatatcgcgagttactgtttataagatgaaaaatgaaggatgaaggatgaatccttaatccctatctcattcttttgttggttgttttaagtttgcaggggggagaggtgccgcgaggcagttctctctcttttttcgtccatgccaactgttggcggtaagcgggaaataacctatctttgtccgtcagataaaacaatcctgtcatcatgaagaatttacgtaactgctatgcagcgttcctgctgtttgccttgctgttcgttgcggctgccgccccggcacaaaccgatctgcagcaaaaactgggtcggatttccgccattacggaaacccgtccgttggagtccacccggttctccgagaagtatgtaacctatttcacccagccgttggaccaccgtcgtcccgaaaagggcagtttccgccagcgtgtgattgtctcccacgtcggcttcgaccgtcccacggtgattgtaaccgaaggctatggagccgcctatgccctcaaccccaagtatcgcgaggaactttcagagttgctcgatgccaacatgatttttgtggaataccgttatttcctggaatccacccctgagcccaaagactggcaatacctcaccgccgagaattccgcagacgacctgcacgccgtccgcaacgcctttaaaagcatctatcccggcaaatggattgcgaccggcatcagcaagggcgggcagactaccctgctctaccgcacgttctatccggacgacgtggatatttccgtgccttatgtagctccgctctgctacggggtggaagacggacgccacgagcctttcctcaggaaagtgtctactccggaggaccgcaaacggattgaggacttccagttggaagtgttgaaacggaaagccgcactgctcccccgctttgagaaatattgcaatgaaaaaggactcaagttccgtgcgcccgttgaagagatatacgactattgcgtgctggagtattcttttgccctttggcagtggggaactcccgtcagcagcatccctgccaccacggcctcggacgatgagatatttgcccatctgctcaacatcagtaatcccgactacttcattgccgacagtcccacagcctcattcttcgtgcaggccgcccgcgaactgggctattacggctacgatacgaagcctttcaagaagtatctttccatccaatcgagcaaggattacctgcatcgtctgatgcttcccgaagagctgaaagacatgcccttcgacaagaccctaagcaagaaaatcacgaagttcctaaaagagaatgacccgaaaatgatattcatctacggacagaacgacccgtggacagctgccggagtgacctggctgaaaggaaagaaaaacatccatgtattcgtagagcccggcggaagccatcgggcacgcatcggcacactgcccgaagaggaaaagaagcaagtgatggagctgataaatgaatggttgaaacaataaaaacggatggtccgtgtggcatgaacagaccatccgtttactcctgacagaccatctgttctacctcaacagatggtctgtttttttattctataatttgtgcatcctcaatatcgtccactgcctttactgaagcatccggtgtcttcgggcggcgacgcgtaaacttgaaccagttcagcagttccgaagccgcatagaccagactgctgataccgataatgataaatgccgtggagcgtactcccgtaggattgaacagcgcaaccaagccggcaagcagaatcaataccggaaccacataaaaacctcccggtaccggcatccagcgacgggcagcggaaagcgaggcaatctgttgcactcctcccatcaccaggataaatcccaatacaaatgtcagcaaatcggcaaagaaaccgggcatgataatcagccacaagccaaacagcaggctgcccactccctcgatagggaaacggctgcgcatctccgtgctctgtgcaaagtagcctatgatgctgataagcgaaggcaccaggaaaatgacacctatcgtaatcacaaagtaatcacccgcctggtcgggaaacatcaccagcaccaaaccgataaccagcgcacatatagcacgcaaaaatgaataacttaatcctttcatgagtctatgtttttttgcgaagatacatctttatccgaataactccacacgaaaatcccgaaaaatcagtttacattcagccaggcattcatatcttcggccacaaaaagccagtataataacaacagtacagcaataaccacgcctatggcaactaaatgttttctattcatagtttgttcctttctttttttgaatgaatattcgtttttactacacttataagaacaatatttcaagaaaaatgttcttatccagaaaaaaagtcatatttattttggcagttaaaacaaagtgcttatatttgtcgcgaaaacgaagacaggctgcacctcagcataaaaaatgaacaagttcattttattatacattcggtttgcactgtctttgcccccgataaaacaaaaaaagtcaatgaaaacaatgttagtaaatacatattggtggtggcacccgttacaactccgacagtcgtaagggagcagcgctcgtatgtatatatgtaatatatagtaaaaaacaaaaagagccctgtcgcaccaagcgacggggcttttttcgtttaagcaataatgcgttttgatttctgaaatagtaaatagtaaatcgtcaaatagtaaataacatgatgaatttcttagttgacaaagaaggttattacggagagttcggcggggcatacgttcccgaaatcctccacaaatgtgtagaagagttgcagaacacctacctcaaggtgctgcaaagtgaggacttcaagcgtgaatacgaccagttgctgcgcgactacgtgggacgcccttccccactctacttggcacaccgcttgtccgagaagtacggttgccggatttacctcaagcgtgaagacctgaaccacaccggtgcccacaaaatcaacaacagcatcgggcaggtgttgctggcacgccgcatgggcaagcgccgcatcatcgccgaaaccggagccggacagcacggtgtggccacagccaccgtctgcgccttgatgaacatggaatgcatcgtctacatgggtaagaccgacgtagagcgccagcgcgtcaatgtggagaagatgaagatgctcggcgccaccgtcgttcccgtcaccagtggcaatatgacgttgaaggacgccaccaacgaagccatccgcgactggtgctgtcatccctcggacacctactacgtgataggttccaccgtcggcccgcatccgtaccccgacatggtggcacgcctgcagtccgtcatcagcgaagaaatcaggaagcagctccttgaacacgagggacgcgaatgccccgactacctcatcgcctgcgtaggtggaggaagcaatgcagccggcaccatctatcactacgtcaacgacccgcacgtgcaaatcgtcctcgccgaagccggcggaaaaggcattgaaacgggaatgacagccgccaccatcgccctcggcaagatgggcatcatccacggctcgcgcacctacgtcatccagaacgaggacggacagatagaagagccctattccatctctgccggactggactatccgggcatcggccccatgcacgccaaccttgccaagcagaaacgtgccatcgtcctcgccgtcaacgacgatgaagccatccgcgccgcctacgaactgacccggctcgaaggcatcatccccgcattggaaagtgcccacgcactgggtgcgctggagaagatgaggttcaagccgacggacgtggtggtgctgacggtgtcgggacggggggataaggatatagagacgtatttgagtgatgagttataagtgataagtgatgagctatttgaaaatacgagatgcaatgaaataaaatacaagatacaatgaaacaatatgattataaaacagtcagccgcaccatgctcggtgacttgcatacgccggtgagcacgtatctgaaggtgcgtgacatctttccgcagagcgcacttatggagagttccgactatcacggcagtgagaacaaccgttcgttcatcgctctgtgtccgctggctagtgtcagcatagaccacggcacggctatcttccgcctgccggacgacagccgcgaagagcatcccataaccgatgcataccgggtggagaatgccttgaacgatttccgcgcccgcttccgcgtggagggcgaatacagcaattactgcggactctacggatacacctccttcaatgctgtccgctacttcgagaatatccccgtgaaggacagccgcgaagctaccaacgatgcgccggacatgctgtacatattatataagtacctcatcgtcttcaacgacttcaagaatgagatgctgctcctcgagatgctggcgcccggcgagaccagcggactggaccaggtacagaaggccatccataaccgcaactacaccgcctacgatttccgcgccatcggccccaccacctctccgcttacggacgaggagcacaaggcgaatatccgccggggcatcgcccactgtctgcgcggcgacgttttccagatagtcctctcccgccggttcgagcagcgtttcacaggcgatgacttcaagctctaccgtgccctgcgcagcatcaacccttctccctatctgttctatttcgacttcggaggcttccgcattttcggctcgtcccccgaaacccattgccgcatcgaaggccgccatgcctatatcgaccccattgccggaaccacgaagcgcaccggcgatgcagagcaggatgccctcaatgcccggtacctgcacgacgaccccaaagagaacgccgaacacgtgatgctggtggaccttgcccgcaacgacctctcccgcaactgccacgatgtaaaggtggatttctataaggagatgcagtattacagccatgtcatccacctcgtcagccgtgtcagcggaacgctccgcgaagaggccgaccccgtcaaggccttcatcgacaccttccctgccggtaccctgagcggcgcccccaaggtacgcgccatgcaactcatcagccagctggaaccgcacaaccgtggagcctacggcggctgcatcggtttcatcggactgaacggctcgctgaaccaggcgattacgattcgtacttttgtcagccgcaacggtgtcctctggttccaggcaggcggcggcatcgtagccaagagcaacgacgagtacgaactgcaagaagtgaacaacaagctcggcgcactgaaaaaggcgattgagatggcggaaaaaatgtgagtttatgtacgatttgacgatttacgatgtacgatttgccatgcggcgtacattgcgcagccaaatcgtacatcgtaaataaagtaacttcaatcgtacatcgtaaatcgtcaaatagtaaataaaatagattgtaaatacaaaagatgaaaacagttatcatagacaattacgactccttcacctacaaccttgcccatctggtgaaagagcttggcgcagaaacggatgtgctgcgcaacgataaattccggctcgaagaattggagccatacgataaaatcatcctctcacccggccccggtgtccccgaggaagccggactgttgctggatgtcatccgcacctatgccggacggaaacccatactcggtgtctgtctgggcgaacaagccatcggacaagcgttcggtggaaagctggtcaatctggaagaggtgttccatggggtacagacggagataaggaggaaggaggaaagactagggacaagggatgaaggattagggggaaaggattatgaaggtatttctctcgaagaagactatatcttctgcggtttacccaataggattcccgtcggacgataccactcctgggtagtggatacgaaggagtttcccgacgaacttgccattaccgccatcagccccgaaggacaaatcatggcgctgaaacatcgggaatatgacatacacggcatccagttccatcctgaatcggtactgacacccgacggaaaaacaatcgtaaaaaactggcttttcaaatgaggcacttcagaaaaagagtaaattcaatcgtcaaatcctaaatcgtcaaatcgtaaataaaaagatgaaagcaatactcacccgtctcttcaaccacgaagagctcacgtcggaggagaccaaacaaatcctcctcaacatcaccaaggaaatgtatcctgaggcgcagatagcagccttgctcactgccttccagatgcggagcatcactgtggacgagcttatcggtttccgcgaagcactgatggagacacgccttcccatcgacttcgccccctatcgccccatcgacattgtaggtacgggcggcgacggaaagaacaccttcaacatctccacctgcgcttgcttcgtagtggcgggagccggctacaaggttgccaagcacggcaactacggagccacttccgtgagcggagccagcaatgtcatcgagcagcacggcgtacgcttcaccaacaaccccgacacgctgaaacgcagcatggaggagtgcaacatcgcctaccttcatgcccaacttttcaacccggcgatgaagtttgtcggtcccgtacgcaagacgctgggagtacgcaccttgttcaatctgctcggcccactggtgaatccatgctgcccggcataccagctgctcggtgtggcagacctctcgcagatgcgcctatacaccaacgtattctataagctcggcattgactttgccgtagtcaacagcctcgacagctacgacgaaatctccctgacggacgagttcaaggtgatgacccgcaactacgagcgcatctaccgtccgcaggccctcggcttcaaagatgcccgtcccgaagaactcttcggtggcgcatgcaaggaagatgccgcccgcatcttcgacaatatccttacggggcatgccacacctgcacaaacgcaatgcgtcattgtcaacgccgcctttgccatccaggtgatggagccgcagaaagagattgaagagtgcatcgccatcgcacgcgaatcactggatagcggacgggcgctggctacactgaaaaaatttatcgagattaataaatgaagcaatgaaagatatactgtccgaaatcatcgcccataagcaaacagagattgaactgcagaagcaaaccgtctctccgaagcagttgcaggagcaagccgaagtcatcatccgggagaatgcggtccaccgccgcagcatgaagcaggcccttgccgcttcttctacaggaatcatctccgagttcaaacgctgttcaccctccaaaggctggataaacgaggctgcccaagcagaggaaatacccgcctcctacgaagccgccggcgccgccgccctctccatcctgacggatgagaagttcttcggcggtacgctgcgcgacatccgcacggtccgtccgctcgtccgcatccccattctgcgcaaggacttcatcatcgacgagtaccagcttctgcaagcctgcatcgtaggtgccgacgccgtactgctcattgccgcctgcctcagtccggagcagtgcagcaccctcaccgcccaagcccacgaactcgggctggaggtattgctcgaaatccacagcccttcggaactctcctatataaataaggaggtcgacatggtgggtgtcaacaaccgcaacctcggctctttcgtcaccgatgtggaaaactccttccggatagcccggcaactgcgcgaagccacccacggaccggcatccccgctccttgtctccgaaagcggcatctccgaccccgaaaccatctgccgcctgcgtgccgccggcttccgcggtttcctcatcggcgaaaccttcatgaaaacagccaacccgggcgaaaccctgaaaaagttcatccaagacagtctcttaattaataattgaaagttgaaagttgataattgtaaatacaaaagtctctcatacagcgttacatcgcgcagccaaatagtaaatagtaaatcgtaaatagtaaatcgtaaataaaatgtctcctctcatcaaagtatgcggaatgaccgaagcagaaaacatccgcaatgtagaactgcaaggtgcagatatgattggttttatcttctaccccaaatctccccgttgtctgtgccagatgcccgggtatctgccagcctgcgccaagcgcgtcggcgtctttgtcaacgaaagtaaggaaaacatcctgatgtataccgaccgtttcggccttgactacatccagctgcatggcaatgaagctcccgagtactgccgttccctgcgcaatgcaggcctgcacctcatcaaggctttctctatcttgctgcccaaggacctgctttccgtatctgcctacaatggtctgtgcgactattacctcttcgacaccaagaccccgcagtacggcggttccggcaaccagttcgactggaacctcctgcaccgctacaacggtcccaccccgttcctgctcagcggcggcatcaacccctacagcgtaaaagccctccgggagttccgccacccctatttcgcaggtatcgatatcaacagccgtttcgaaacggcaccgggaataaaggatgtggaacgcatctcaaacttcctgaaagaactcgatgggtttactatttgacgatttacgatttaccatgtacaatgtacaatttgccatgcggcgtacattgtgcagccaaatagtaaatagtaaattgtaaaattgtaaatcgtaacatgcagcatatattgcgcagccaaatagtaaatagtaaattgtaaaattgtaaatagtatgttgaaccgcattaaccaacttttccaggacagccccaagaatctgctgtccatttacttttgtgcaggctgtcccaacctcgacggtactgccgacgttatccgtgccctcgaaagaaacggagtcagcatgattgaaatcggaattccgttcagtgaccccatggccgacggcattgtcatccagaatgccgccacccgcgccctgcacaacggcatgtccctccgtctgcttttcgaacaattgcgcgacatccgtcgcgatgtccgcatcccgcttgtccttatgggatacctcaatcccatcatgcagttcggcttcgaagccttctgccagaagtgcgtggaatgcggcatcgacggcgtcatcattcccgacctccctttccgcgattacgaaaagagttacaaagccatcgcctcgaagtatgacatccgtgtcatcatgctcatcacccccgaaaccagcgaagcccgcgtccgcgaaatagacgcccacaccgacggcttcatctatctggtgtccagtgccgccaccaccggtgcccagaaagacttcgacacccggaagcaagcctactttaagaagataaaagatatgaacctgcgcaatccacgcatggtaggcttcggcatcagcaacaagcagacattcgatgccgcctgcacccattcatccggtgccatcatcggcagccgcttcgtcacgttgctcaacgagaaggaaggagatgcggaaaaagctatcaggcagttgaaagaagaggtaagaaagttatgagtgatatcactcatgacttttttcgctatctttgtaccccaaaaagaacccaaatacgaaatttatgaaagtcgattgcccttccgtactattgatttacactggtggaactatcggaatgatagaaaatcccgagaccggtgcgcttgagaacttcaacttcgaccaactgctgcagcatgtccccgaactgaagcgcttcaactaccgcatctcttcctatcagttcgacccgcctatcgactcttccgatatggaaccttccctctgggcaaagattgtaaaaatcatcaactacaactacgacaatttcgacggcttcgtcatcctgcacggtaccgatacgatggcctatacagcctccgcactcagcttcatgctcgagaacctttccaagccggtcatcctcaccggttcccagcttcccatcggcaccctgcgcaccgacgggaaagagaacctcatcaccgccattgaaatagccgccgccaagcatccggacggtactcctatcgtccccgaagtgtgcatcttcttcgagaacgagctgatgcggggcaaccgtaccaccaaaatcaatgccgagaatttcaatgctttccgctccttcaactatcccgcactggcaaaggcaggcatccatatccgttataacgagcacctcatccaccgtcccgacccgtcacgccccatgaagccgcactaccttttcgacaccaatgtcgtagtgctcaccctctttcccggcatccaggaaagcatcatcaactccgtgcttcatgttcccggcctgaaagctgttgtcctcaagaccttcggttccggcaatgccccccagaaagaatggttcatccgccagctgaaagaagccagcgaacgtggcattgtcatcgtcaacatcacccaatgccaaagtggcgccgtcgagatgggacgttacgaaaccggtctgcaacttctccaggcaggtgtcatcagcggctatgacagtacccccgaatgtgccgtcaccaaactcatgttcctcctgggacacggactggaccaagccgaaatccgccaccgcatgaattccgacctggcaggagaaatcaccaagattcagtaaagcagcaacacagagggtatatagttatattgacaattttcaaaataaacttgttttatctattcgcacaaaagcgttaaaaagggttaatcaccatgcttttatcccccattaataaagcttattagtttaaataaacgtacttttgcttacaatcaagcaaaacaaatataaaatatgggagaaaataccctatacaaacgctttctgccacttgttattcttacagtaggcatactgctgcagggttgtaaagacgatgtttttaaccccgaaaaagtgaaagcagcctatcaagacaggtttccggtcaagaacatagacccggctatggattggaaaatgactcagcaggtccgggtcaatgtttctgtatccgaagataccggcatcgactataccatacgtatttacgacaagaaccccttaatcagccggtcatctgccaaactgctggcagaaggcaccgccaataatacaacagtatttactaccgtcatggactgcccttctgtactgacgagcgcttttgtgtgccgcaccgatacacacagccgcaacatagtaaaatatgtatccatccaaaacggtcagctccatgccgctttcggcaattcccttgcaactacacgtaccgcatggacgcgcagtgtcagcatcgagacctattcaccggaaaagtctgaggcggaaatcaccgcaatgctatcaagcgccgaagaaataaggccgaataccgattttcaaaacggaaaagcctacaaaatctccaaagacaatatatataggaataaaatcagcaaggacggcatgggaagtgacaatccggccatcatcatcattgaaggcagctgggaacccaatggaaacaacatgaccgttgaacgaggcttcgaattctatgtgattgacggaggggaaatcgtgataccggacgagcacaccttcactttagtgcaatccagccggtttatcgtctacgcgggtggaaccatcaaagggaacgacatcgaattgaccaatgcatccggaggcagctacaactacaatgccggcaccatagaaatagatgatttccatgtcagccagggaggagtattctataattgcggtaccgtacgtgtcgatgaaatgaatttcgacagcggatgcaaattcatcaaccagggcaaagcctacatcgggaaaacccacagcaacatcactatagacaacggatgctatctatatacggaagaatttgtaggcacactgaacatgggagacacctcttctgcagagatagaggatttcggggaccatagcaacaattacaacaccagaatcacaatgggtgacaactccatgataaccgtacttgatgaagcagaattgtcacaagcacaatttatgggctcaaacaatgaatatgcactggtaaaaatcaataaagttgaagatatagggaatttttccagccagggaaacattcattatgaagtgaaagaaattgacgatgatatcactgaggacatctggtgggaagccaaattccttgatgccatcaagaataccgaaggaaccatatccaaatggggagaatcccccatcaccattcccgccggagactgcacgggcgaaggcaatactccgaacgagtccggctcagagccccctacagacccagtctcctatacgtacgtattcgaagacaacttcccgttggtaggcgactatgacttcaacgacgtggtcttggacgtggagacctactatcaccgcgagaaaaagacgaaccacatcaagcgcatacagctcgacgtgacccttgctgcggcaggagcaagcaagccgttgggcgtagggctccggattaccggaatcaataaatccgatatccgggaaatcaagaccggaggcgacgattcgcgtttccaggagtcattcaacagctcgtacaacaaattcaggtacaataacgctacttatatggaagattccgatccgaatgtcataatccccatcgcaggcgaagtacacaatgtatttggagttgaatcgggtaagatggtaaataccggcattggagtgaccgccaaagagtatacttataaagtcattattgaactggcagaccaaaaccggacagaacccctattctcaaaagacaatctggacttcttcatctgttatcaatataaaagcatggaacaacgcatggaagttcatctttacgaattttggggatatggcgccactgccgccggaaccatacagcaagagaatcttgacttagcaggcaacaacacatgggcaatctgcgtgccgtatggcttccgctatcccaaggaaaccatcaatatttcacgcactgatatccccgaagcaagcgcatatccggaattcatctattgggcccaagacagaacccagtatacggaatggtacgaacacccggtagaagaaaatgtatatagataaatatagcaaacaattatcataagcaatgaaacaaatattatttgtagatgacaaacctgccataggcaaggtactctcggtctatttaggaaaagaaaatgagctggtctatttcgaagatcccgtcagagccatagaatggctgaatgaggggaacgagcccgctctcatcatttcggacatacgcatgcccaaaatgaccggaggtgaatttctggcatatctgaaaggcaattcactgttcaaggacattccggttgtgatgctttccagtgaggaaagtaccaccgagcgcatcaacctgctcgaagcaggagccgaggatttcatactgaaacctttcaatcctatggagctgaaggcccgcatcaagaaatttctctaaacaacaaaatcaatggatatgttatattatatctacataggtagcaaccgcgtcaccatcggccacttgagcaaaattgcgggaggcatgttcatggctgtttcatcctgcaacaaagcggcgaaagtcatcgacggtatccgcgaacggtacaacacatccattctttacgaagaaagtacccctcaaaaggacagccaggacatcactttcctgcacaagcgcttcccccgtgtctacatcatcctcatcaccgaagggttgcagaaggaacaccgcaagctctatctgcaggcaggtgtcaacaacaccctttcccctatggccagcgaagagagcctccagcaaatgacgaaattcctccggttgcgcaaggagcacaaactgcaggaattcagccagtcacaccgtaagatattcaacaccttccacctgcctatgtggaaacgtatcttcgatatactgtttgcgtgtgcagtgctcgttgtgctttctccgctactcattgccacagccatagccatccgcatggagagtaaaggcaaagtgatttacaaatcccagcgtgtaggcagcaactaccagatattcaacttcttgaagttccgctccatgtacaccaatgcagacaagcgcctgaaagaactgaatgccctcaaccaatataagatagaggaagagcttacggacgagcagcccgatatccgcttcgacgacctgaccggcacttccgaagaggaggctaccctgctgatttcggacgattttgtcatctccgaagaagatttccttaaaaagaaggcccaagaaaaacagaatacgtttgtcaagatagagaacgatccccgtgtcacccgcgtaggccgtttcatccgcaagtacagcattgacgaactgccgcagctgttcaacgtcctcaaaggagacatgagcatcgtgggcaaccgcccgctccccctctacgaagccgagctgctgaccagcgacgcatatatcgaacgcttcatggcccctgccggactgacaggactgtggcaagtggagaaacgaggtggcgccgggaagatgtcggccgaagaacgcaaacaactggacattaaatacgccaaagaattctcattctggctggacatgaagatactgtgcaaaacgctgacggcatttgtacaaaaagagaatgtataaaataaagataacaggaattatatggctttagagacaataaaaagatatatcagttccatcatttacagtgtaatcctcttaggattgttgggggtgtctttgtctgtggctgcgcagcaggagttgacacgggaggagcgcatcaagatattggaacagctcaaaatggaggacaaaaaaatagaagtcaacacattgggtttaatcagttcgaagacatcaatagatattgagaatttagagttgcctcctctatccgtctttcttgatgcagtaacagagaatgcgtcagtaaaaagagcccaatcccaagtagagcaagtcaagaaccaatatcgcctggaaaaaaggaattggtggaactacttcaggctgaacggtaactattcttacggacgctacaacatcataggcaatgccagtgacgagttcacccctatgtaccagacaacgatgtcaagtgcccagcacaacttcaatgtcggggccagcgtcggtgtcagcctgggtgatctattcaaccgtccgttgaaactgaaagattatcgctaccagatagaacaattgcaatatgtacaagaagatgtcatggaagaacggagactaaaggtcttggaagcctacaatgcagttaccgaacaattagccaccatcaaagccaaagcagaaacggctgccttgtataatgcacaaatgaaaatatctgaaaataatttcatacaaggagccatcgacatcattgcactttctttagagcgtgcgcgccgcaccggtgccgtgaccacgtatgagcagagtcgtgtagctttacacaattcaattgtattattggaaatgttgactaatgtaaaagttataacagacaagtaaactaattatgaatatagtacaatttttggcaagcttcttttaccgcatccgttattggttattgtggggaagtcttcttgttacggcattggtcatatactttacccaatttttaccatacagttatacggtaaacagtagtttatatgcaggcgtaaccaatagtaccaatttggatggaagccagcttatcaacatcaacagtactttcgacaatatcattaatattggcaagtccaaaaacactttggcaaaggtttccgttcgactgcttgcaaccaatcttgtacacggtgatgaatggaaagacaatatgtacattcaagccaaacattacagacaacttgtccaaatccttccaaaagaagtattggctttggtagaccgttcctctttggataaaaccgtaactaatttaatgaattacagaaaggagaacagtagcaattttgtctattccatattcaaccgcccttatccgttttatagctataacgcattaaattcaatcaccattaaacgattgggtaccagtgacctgatagaattggtatatacctcctccgatcccggtattacgcaaaacaccctcaagatattggaagatgaactgttaaaggcttatgagcaactccggttcagtgccacaaacagtgctatcgcctattttgaagaacaagtgcgaatagccaaaaaagcacttactgcagaagaagatgatttgacagactatagtgttcaaaaacaagtcatcaactacgacgaacaatccaaggcattggctttgaccaaatatgcgacagacgaccgtatggaagcagtgcaacgaaattatggaagtgcagtagccttgcgccaaatgttagagaataaaatggacatacgggccaagattatacgcacaaatacgaatttattacaagagttggaaaaagtcagcaccttgaaccaaagcattctcgaacaagaaatttttaccacagaacaaagtcagaagaaaagtgataaacttcaaagagaaaaagatgctctgcaaaaggcagaagaaaaaataagccatctctccgataatttaaacgagtatggtttctccaaggagggtgtaggcattcgagaaatggtgacagaatggctgacggcatgcatcaatgaggcgaaagccaaagctgaagtgaaagtattggttgaccgccaacgggacattatcggccaataccgggaattctcacccgtaggcactcaaatcaagcgaaaagaacgtgccgtaggcattgccgaagacaattaccgccgacaaataggaggccttgctgaagcacacctccgtttgcagaatatcaagatgacaactgccaacctgcaggtcatagcatcacccgagtatccgctgacagacaatggcagaaaaagaattatctacgtccttgcggcattcttcggcagtttaatattcataagcggttacttcctgctgattgaattgttagaccgcactctccgagaccctgaccgcagcaaacgtctgaccggactatctgtcattgcagcattcaacggtgtaagcaacttaaaattccgtggattcctcaaggcttgcaaccggcttgccgcagcctacagttgccgacaattcaacaactacttacatccggatcgtcccaccgtcataaacctgctcagcatggagaaacgtgaagggaaatcattccttgccaaatatttcatcgattactgggaaactgagggtatgaaagtgcgccttgtaaaatacgaccacgatttcgacacccaaaacaagggatatgtacaagctcaagaattgtctgacttctgggctttaaatgaagcagaagaaataccggacattattttagtggaatatcctgctgtcagtaccgccactttacctatgtcggtattgaaaaaagcagatttcaatttgctgatagccaacgctgcccgattgtggggcagagatgacgacacccgattgaaaccgttaaaggaagaattggaaggaactcctctatttatgtatctcaacaatgcagaccgcgaagtggttgaaagctttaccggagaattacctcctcatactccggtccacagtttcttcagccggttggcacaattaggtttaacatcaaaatcagcagctgtcaaataaatgcaaacggatatcaaaggacatagcatatctcccttggcggtaacattattagtgttcatcatcggactgggtgcactcatctatagcatattattcagtacttgggatatcattgcatacgtttgcctttcccctttcttcttgataatagcaatacaagcattaagaaacccttttgccggtgtatgtttcctattcacattcaattactttttcattccctggtacagatacacgcaaggtagtgggttgagtgtctggtatgatgttgcaaccgtcaccctgcttataacacttttgatatattcctatcatcaacaaggtaagattgcatggaaatacaccaaaaatattctgacgtttggaggttgcatatgggccatatatactgcggctgaaatcataaacccaacagctctcacggaagcttggatttactctcgtggaatcatatacagcacccttgtcatgtcattaattggcgttttaacaatgacctcctataagcgattgcgcatcattatgctttttctgtccatattcacattgacagccgtagccaaaactgtttaccagaaatatgtaggttttgatgagacagaaacaaccatgctgattgaaacggaaatgtacaagacacaccttttatccaatgtcacccgatatttttcctttttcacagatgctggaaatttcggttccaacatgggttttgctgccattctgttcggtatctcggctatcttcgtgaaagaacgtttcataagactctattatataattattgccctttgttccatatatgccttgttcatttccggaactcgcggtgcactgtttgtccccatcggaggaagcatattgtttactttcctcagtaaaaatatcaagctcatgggagctacagtcatattcggcttatttttttatatctttttcgcccatacctatatcggtgaaagtaactcttcaatcagacgcatgcgcacagctttcagacctacagaagatgcctcatacactgtccgcaaagaaaaccaaaaaagattggctgaatatctaaaatacaaacctttcggagaaggactcggtttgggaggggtagaagccagaaaatatggttcccgtctcacaacactcattccccatgattctttttatgtcaagatatggatggaaaccggtattgtaggattagtgctttttcttaccatatatgtcagtacattgttaagaggttgctatcttatcatgtttcggattaagaataacgagctacgtggaatactcacggccattgcttgcggcattttcggactaatgataagcgcctatggaaatgcttttttcttccaattccctacaggattcatggttattttatttttgtcagtcctgattaatggggagcatatcgaccaactgctgacccaacaaaaaatgaaaaagaaatagaaaatattaaatagaaaacatatatgaacgacattttttccatattcaatcccgactggtggatggacgagaacaacaatgccttgcaaatgacagacgcggttcttttcttattgctgggcatccccgtagcctacttgtttatctatgcattggcctccttgcggaaatacaagaatccctatccaccgtcccccaagcaacatcgtttcctggtcctctttgttgtgttgaaaaacggcaaggaagtgatagagtccatcaatcatttccttgatacgcagatgtatccgagagaaaaatacgacatcgcagtagctgccacacaactgtccgaagaagacttagttacgctgctccagatgtcggtcaatattgtcgtgcccgataaagagcattgcacaaagatatatgccatacagcaggttatggagcgttattctcctcatgagtacgatgccatcaccatattcaattcagacaacaaagttgttcctaacgcattggagcttttcaacaacgcctactactccggatgcgatgccatccaagcccaccgcatgacggaaaacctgaataccaacatcgccgtattaaacgccaccagcgaagaaatcaacaaccacctcttccgcaaggcacatacggcactgggattctcctccgccctcatcggttcgggcatgatgtttgattttgagatgtttcaggaaatcgctcccagattatcaggaagcgatttggccaaagctacagaaatggaactcttgaaggaaaacatatataccgaatacatggaagaaatagtctgctattgcaaaaagacggacgatacatcggggtacagcaaagaacgccaacgctggttgggctcacagtatcgcagctccatactggcattgcaacaatttccgatagccttcttacaaggaaagtgggatttatgcgaaaaattattccaatggctacttccatcccgttttctgctcatcttatatatcacgatatgtgccgtggcaataacattcctggagtggccgcttgctacaaaatggtatgcacttttagccgttttattcatcacttttttgatggccatgcccgaaggggaaatcagccgcaaattccggagcgctttctggtctctgcccatattggtagtcacctcttccatgagccacatcacaagaatctttaaacggaaaaagaaaagaaaggcagcaaaatgagaatcgccatcgaagcccaacgcattttccgcaaagacaagcatggtatggactttgtcatcctggagacactgaaagaactgcaaaagcggaaagacagtaatgaatattacgtattcgttgctccgggggaggaccggtgcctggaagaatcggaaaacctccatatcattgagctttgctgccctacttatccactgtgggagcagatagcattgccccaggccgccaggaagctgaaagcggacttgctgcattgtacatcgaacacagccccgctatggtgtcccatccctttggtgctgacgcttcatgacattatctatctggagccgcgtcagcatcgcagtccttccttctatcaggaaatgggatggcattaccgtcgcctgattgttccccgcatcctgaagaaagcaagaaagattattacagtttcgcagttcgagtgtacccgcatacaggaagctttgcagcttcccaaagaagtcattaaagccgtgtacaacggctacagcgcttactttacgatgcaggaaacacccgataagagtattgtgcagaaatacataccgcatccggactttcttttctttcttggaaatacagaccccaaaaagaatgcggcgcgtaccctgaaagcatacgcgttatatctgcaagcatcccaaacgaaacgcccccttctcattgccgatttaaaagaagaatatatcgaccagcttcttcagcaagaaggaatcaccgggataaaaaaacatctgtattatccaggatatatcggcaacaaagatttagtaaccctttataatgcagcatttgcattcctctatccttccttgcgtgaaagtttcggaattcctatgctggaggctatggcttgcggtactcctgtagtgacgagcaacgtttcggcaatgcccgaagttgccggtaaaggtgccattttagtcgaccctcaaaaaccgcaaaaaatagcagatgccttgctacgtctggagaatgatgcaacattctatcagcaacaagtaaattacagtctggaacgtgtaaaactgttctcctggaaacacacagcagaagaatatgtaaagatatatcacagtattcaccagtaatcggcaaacatcatgagagacttcatcatcaccagcctgcaaacatgggacatcgaaataggtagtaccatcaagaatactgcattggaaatttcaaagcagaaccgggtgctctacataaacactccgatggacatttccatccggctgagaggggacagacaatctccgtcttacatccggcgcatggctgtcatcaagggagagacttcaccgctccggcaaatcaacgccaacatgtggatactggactgtcctttcacagtgctctcggccaatttcctgcccgcatcgcttttcaatatcgtcaacagaaaaaacaatgcccgcatagcccgatggattgtagagcaggccaccgcactcggcttcaagaattacattcacctcattgatacagacatttaccgcagccgctatctgaaggagtatattcatccggctgtcagcatctattatcggcgcgactacgtcataggcgaagcttactggcgcaggcacggcacccgtcttgagccggaattagcagcctctgcagacattgttctggcaaactccacccgttttgccgcagagttgcaagcctacaatccccatacctaccccatcgaaaccggagtaaacctgacgctatacgaccccgccaaagagtacggaacacccgatgatgtacaaaatattccacatcctatcatcggatatatgggtacgataaacagtacccgccttgacggagaactgctttatcagataataagtcagcgtcccgattatagttttgtgttcaccggcccggaagatgacattttccgtcgggaccgtatccatagtttgaaaaatgcctatttcaccggacaaaaaaaagtggacgaattaccggcctacatagctgcctacgatgtctgcatcaatccgcaaatggtgaacaagattaccaacggcaactatccgttgaaaatagacgaatatctggctatgggtaaacccactgtcgcaaccagtacccacaccatgcgcaacatattcacaggtcacacgcacctggccatcaacccggaggaatggcttgcggccatagaccgtgctgtgaccgaagctgacgacaaagaactggccaaacagcgcatagcctttgccgagacccacagttgggggcatagcgtgaagaaaatctatgaaataatcgactcattcctaaagaagaaaactacatgaactatcgtaacatagacgacttgaaccattgcatcctgcaacatctcagcattctgccacgggatttcgacctcattgtcggtgtaccccgcagtggcatgtttcccgccaacctgctggcactctatctgaacctgcccgtcacggacattgattctttccgcaacgggcatatttatcagaccggagaacgggggaaaactttcaacatgacccacatacacaaagtactggttgtggacgacagcatagccacgggaaaagctgtgaagaaatgccgcgagctcctgaaggacatagaacatttatacaacatcaaatactgtgccatttatgcagttccactacacactcattctgttgattattttttcgaaatagtcgattatccccgtttcttccaatggaacatcatgaaccactctattctgcaaaaaacgtgcatggacatcgacggtgtgctttgcgcagaccccactccggaagagaacgatgacggcgagaagtaccgtcatttcctgctgaacgctcttccgctattcattcccaaagtcaccattggcacactggtcacttcacgcttggagaaataccgtccggagacggaagcctggctccagaagaaccatgtgaaatacaataagctcgtcatgctggacctgccggatatggctgcacgccaacgggcgaattgccacgcctccttcaaagccaaagaatacggttcatccaccgactacatgctgtttgtagaaagctctatgccgcaggctgcggaaatcaaccgcctgaccaagaaaccggtgctttgtacagaaactttccagatgatttatgaatccaaatcactatactataatctgaagtcgggagaaacattcccgtggctacggcgttttatgataagggtgcgcaacagactgagagcattatctccttccaagaaatagcattcgcagcattttggaacagttaaacagtttgtctactaataccggcccgattgttgcaataaaagttgcagacagcaatatggggacaatcgcatcaatccccatcattttcagtataatccgcccaccggaagtaccgaaaccatgaaaaagataaatactgtacgcatagccgcctatccagacaaaaaaacggttgtgccacttcaatgccagcagcaggaacaaggtgggaatcaacgtcacgggataaagcaacatgctcaaagaggcgtatttaccgggatagaaccacactatctgtatcaagacaatcccccatagcgccacggcaagcaagacacgcctgacagccagacgactgtagagcgacacagcaaaacggcaggcagccacgccgacaaagaaatagggcaactgtcccaaagcgcccttgaaactgaacaggtcgggaacctcatgcagaatccatacatcatttatcctactgaaaatcagcgccacaatgcaacaaacagcccacttgcccggagtgtccatccacttccggctgtccatccaccattgcactacaaaaatcaagaacaacgacggcagataccaatatatggtataagggaatacataaatgcgccacatttggctaagctcccctttattattagtgcccggcatcagatactgtaccagaaaatacaacgtgcccaccgccgccatcggcaccagcagacgcaaagctttcttccggacaaaacttccaaaaccggaagatgcagagaaaggcttcaacgcataaacccagccggcaatagccgtaaacaacggcatctgaatataatctatccatacgtaaagataacgcaatggatgtggaaaatcaaatttcatgcccccaccaggtccggaaccgatgacatgccccaccactaccaataaaatagcgataccacgcaaagtttcaatagataagtttttttcctgattcaccatgaaacaaatatagtgcatttgttcgaaagaacagaattaaagaacgtgaaaaaagaacggatttaaagaaccgccttatgtatctcttaaaggtcttgcagaataatacaaaagtaatttccgtttaccgaaagctgagatttgggataacacgtgagcatattaactatcttccattataaattcaagcatagagtatgaggaaaacaagagatgtacacacaagagtaagtgtctgttttactaaatataattaattgttaaaacaacaatgaattaaaaaaaaagttatagatttaaatcgtcaaacaatatcaatttaaattatgattgcaaatttagattgcatcagttaataattttctaaaactttttttataatggggacaaatgtttttttaaaagccggtttgcggaattcagatagcaaacgtttttttaaaattctttgggtggttatacttgcgttatatccttggttattgtctgcacagacgtttgctaaggcaaagaaggcagtatatgtaattgttgacggaattcctgccgaccagattgaaaggcttcatacaccggctatattcgatattgcttcaaaaggcgcttacagtcgggcatataccggaggagaaattggtggatattcacagacggcgacaatctcagctattggctataccaatctgctgacagcaacttggtttaataagcataacgtaggaggcaattccgacctgaaaccgaattacaattactggacgatctttcggattgccaaagagcaaccccaaaaatataaaacggctatctattccagttggacgaataaccggacagttttgattggggaggggaaaaaggaaacaaactatctcaagattgattatgtaaaagacggttacgatttggacagcatccgttttccgaaaaaagagaaggatttgcatattttcgatatagacgaacaaatttcgaaagatgcagctgaaggtatccgcacagatgcgcccgatctgagttgggtgtatttatggtacactgacgatgcagggcatattgccggtaacggagcatttttcgatgaatatgtgcgtaaagcagacgagcaggttgcccgcatttgggaagccgtgaaatatagggaggccaattttgatgaagaatggatggtcgttattaccaccgatcatggacgcggagagaatggacacgaccacgggggacagtcctggcgtgaacgtacgacctgggtttcaacgaatgtaccggtaaacagtcatttcacatccggcaatttggcaatcaccgatattgcaccttccatctgccggttcatggactttgaggttccacaatctgtcttgtgggaacaagatggcatgtcctttgtcggggatgctgacatttacgatttgcagacaatgccttatgataatacggtcggtttatcctggaaatgttattcggagaatgttccagtgaccgtttatgttgccgtcacaaataaattcaaagagggagatgaagacgaatggatcaaattggtgacgctaccggccggaaagagaagttacacagtcgatctacaagctttgccagaatcgaagttctataagtttgtcatcgttgctcctggtaatcacttgaatcgttggctagaaaaataagggcatgcaaaaaccttttctgtctaaaggagcttacaagaaccaacaacaagtccaatgggtatttcaggaggtttcttatcgttccgatacccaggtcagaaatggatccgaagctggctgagaagattgttgatacagagttgcccggaattacgaaccggagaaggaaatcataatccgactccggttattttttatgtttccaagagtggtaatttctccattctggtattcattcacgacgaaatgatcactgacctcagaccgagcaccccaagatttattcagttgttcaattgtccgattgatttttttgcattataaatcaggtagcaggcgaatatttttaacgccaaagtccttacttttatcaaaaaatacatattaaagattttctttcatgaagtaaaaaactatagattctttttttccttattcatcaaaaaccagatttttcgctgccattcatacactgcaaatctctcatcatcggagtcgtcagtcttttccacatatgttcttatacttggggcggaaggatatttggcccggataatatcatctatcagatagccgtccagccccttgaattgcttgaaaaggaaacttttgaacataaggttgatatatataggattattgcatatatacgttttatatgcctgatatgctttagacttcatatagtctgaaaccctgctgctgaaattgagtttaccaagctcttcttttaatgcctcttccagttttttatactcagtagagtccgttatactgtaccaataatgttcatcgggtttagttattagatccacccatgcactggcttcccaataatcggttaccattcttatggaatctctttgttccggagacatcgcgtaaaacaaggagtctttttcccagccttcaaaaagagcttcaatagaattgatcttctcttgcttcagccgttcatatatatccggcaattctttatcaagaatggaagttatctggaaagccccactttctattctacaattaacacgtggattggttatgatagagtcgttgaatacaaaagcgatctgcctgcctattgccttttccgtttctttagcccatttgttcaatttgtatttactgatttgcccactaatcacatttttcccaaaatagtccgtttccaatctaagtgaaataaaatcttttatcgtcacgataggttctcgggagatactatctgtttgtccggataaaatatgataccaaccattttcccgaaatttattttggcaaactgaaaaatatggaaggaaagaaaacaatgccaatattccaaataattttttacacataacctaatgttttttaaattctgatttcaaataccgttctccttcgggtacaattctaacagagttccggacacatacacttattaagattcaaaaaatgatgagaataacaacgacagtaattgttacaactattattttttatgagttccgagtatttcatgctattcattgtagaaatcactattaaaccgaaattctaaaagtttacgcaaatttaataataaaaacaatcaaaaagcatgatatttatatattgtctaaaaaatgccccaaaatcatgcagtcatggatttggacttaaaaaaacaataagtggaatgccagcttcaagaacatcactatcctggttccttcattagtgatacaaactacattcttctcttattgtatcaaagccattgcagaaaagacatcagcacacatgcttttatcaattctaaatataggatataaaataatattcaatacctttgcagtataggttaaacttattattcccgccaaatacttttagtgtttaaatcatgaaaaagaaaattctattcattcaaacgtttggtttctttgccacttatctttgtctcgatttcctttttacagaagaagttcatataattgaaatctctttatccgctgtcatgtattttgtactgatgtattttctgaatagaaataagaagtaagtttttacaatgcgatccatagaataaggaatctccaccttattccaatggtgctgtattattcctataaaacttcatcctcttcttattttttcataccttcgcaccattttttaagtacaaacgaaaaaacaatggcaatcatggaaaaaaatcaatttaaacgtgacagataaatcctgaccacacgcatggaatggcaacaccactcgctccgcgtattggtacgtgctttgctgatggactatccgggagcaaaagtagcgggacatcacaacctcagtcccgaccataacaacaacggagaagtggaaccgatggaatggacgaaacaatgcccgtgttttgaggtgaaaaaagagaagtggtaactaagaaaatggagatggcaaagcatgacaaaagctttgtcacctcattttttattcatacatctgttctaattaagcaaaatgcgcatccaacaaagtttagccgtataatataaatgagagagtaaatcttttactacctccaatgattacttctgagccctgaaaatctttcgataaaaattaagttttgtaagaatgctccgtaaccatgtacgcttacgccaacttcctttacttaaatgaacggcaatagtatcatctgtgacttgtttccaagcagctcctaatatacgagaaggaagaatgagcattctttcttctaattgttgttctatttcattattatactttaatccgaatttttcagcagccaacgccagcacatctggtgctatctcctttgtataccaactaccgtcttcttgtataaaatggcgaccttcatagaatttcatagcttccactaaataaggatgtcccctttcagctcctaatatggctgataacaaacctaagcctggtacacgtacaccagggaaacgatttgttccatccggtccaagacgtttacctgccatctcatctccctctatcatttccggatgatattctatagcagtaaaaaagccattggataatagtggatcaaaagattttttcaccatgacatcggtatccatatatattcctccttcggtatataatgcatgtaaacgcacataatctgccacaaaagctaaagcacctacactaaaggcctctttggtccatgacaaagaatttacatcaaaatcctttaaactccataatttccatttatagtcagggagatttttcttccatgaatccatacacacctgtaaactataaggtatcggcgtatcattgaaccagcaataatgaatcgttttgggtatcatttcaagtcatctttagattattttgcaaaaagcctaccacacaaagataaaataaaattctaagaatcagcataagaataacgaaataatcgtcctctatccatacacacagctttccaatataacgcatcatacaccttgaaaattacaaatgaataaaacgtcccaacaacgttcgaataccctttgaaaagcaataaaagaaaatggttaaaatcaccaaaaataacagtgaagaaatcaaagcatagaaaatccattccaagtagccttccataggttctgataaaggtaataatgaaagaatgacatccgctaatagccaagacaaagcacacagacataaatacaacaagatattcttccaataaacactaacgttcattttaaaaccgtcacgatataagaaataaggtttccaaatgcttatgacagttatggaactggcaacatcccccagtaacactcccggcaacccccaataatacccgccaaccaatgctaccaatatcgtaattccaagtgtagcaataggcgcccaagtatcttgaaaaagcccataaccataaataaactgatcattcgtgccacggaactgactaataaaaaagttggcaagaatcactatcaatacagaatgaggcagcacatactctgctcctaaccatacaataataaaagaatccatcaaatgatagagagcaaatgttaaaaaggaagctaccataaaacgtaaagagctgagttcccaaaatacttgttgtatgcgctttgagtcaccttcggcaatcaaattacccactcctgctcccgtacttcctaagaaattattaacgagctggttcaatttcgtcaacagcaacatgtaattgctataataggctaccaattttaaggaagtaaacgcgtaaaccaaaaaaggaagtaattgagaccgccccattcctgccaattgatgtacaaacatttggcgtgccttgcgtacgattatcttattctccggatattttcgacgaccttcagcaatactacacttcagccatggatataccctatttatcttccagttaagtatatatgaatataagatgccaaaaagtaattcaatggcaatccatagataaaaactacctatgtagcaaacaagcatcatctgtaccaatatctttataatatttgcagtctggaaataggccgttacaacataattacgttgatcggctcctaacaaagtttgccgataattaataaagtaactgatgagggcagaagacaaaaaagcaaaataggcaaaatagactacacctaaatcaatactgatatttgcaaatatcaaaggaagaaaacaagccaatatgagccctacccctataattatcaatccgacgttgcgataaagataccccaatacagaaataatatctcgtatcttgtccttgtcatcattaaataaaggtttataaagtacaaaaccaatagatgccccaattcctaattcggccaaattcaagaaacccaataaattttgtaatgtccccattagacccacaaaatctgctcccaacatatccaagaatatcttgcgagaaaaaaaagagatgaatagggtaataaaataaaaaagcacatttacccgggcattcaaatagctttttttgagacgagactctaccataatttcaacttttcgcaaatatttttcattttatccataaaaacacccctaaaggtaccatacacgatattccattgttcattgcatataaaaatccacaaggctttgtaatatccccgccttccgaaatactttctgcattgcatcacacggtaatagctgctcacaagtctatcttcccgatttatttttctcagaaaccggttacagcgacatgctacccaaacccgtgccaacaaattgtcgagcaaaacactatattgtaaagaaccctcacgtattgtagcacaataaatggctacagagcatattgccacattccgagcgtaataatccaaataataagagaacattacatcatttccagccaatgtctcatcaaattggatggaatgcttctgaactatatttctggaaaccatttttgcccagggtacatcattccgatattttagtctctccgcatctatgctttcagtcacatcaaaacctaaaaaatcagattgacgtgaacgcataggaactaaagtttccgaatctgcacttgtagctctgaatgttatcaaatcgtagtccgtagcacaataacaatccagtacctctaaaaaaccgggcagaaaaaaatcatcagcatcagcaaacagcagccacttgcctcgagcatgaagcaggccacaattacgggcatatccagctcccttcccttctttggtgaaaatgatttctacatcttcccgactacttcccggaaagtccataaaatccacgacatcagaagaactgtcatcatcaaccacaataatttggatgtcatcacggaaaggaatagaatccaaacagcgctgcaacaacaacggagcattcttatgaggtataataatagtataagtataatccatactccttacttttgacaacaaatcagttaatacatatgtttaggcccataaaacaccggccctatattcaaacggaacaaaagacgaatatagaaatcatataatatatagcagttgaatcctaaaagaacctttcccaatttatctgtcttaaataccggatgataatatttcaaaaaaacatccctactttctgaaatcatcctcttcagatgctttaccctcatctcacgcgggatagtcctatccggctgataatcacttttcaaagctcttcggaatggaaccagcatagaattaactgtaactaccatatctcccgctggtattttccatactttcatcatttctgccagaagctgttgatatttcacgaaacaacagtattcagattcaaatgaatgaatacggtgggatagtgaaaaggaatgtttcacgtacacataattctgcatatggttcaatacaagataatcacaatgcaacaagtactgatacataaacaacaaatcttcaagacaatgtatattctcatcaaagcgaattgaaaattcttctattatactccttgcataaatttttgacacagcatatcccatttcacaaatattattctctgcaaaagatttacctatactggagaaaggcaaataacgatccggcaaagataaagaaggcaaagaggtaccatcagttctcctacacaacatcccttgaatcactaatcctcttcctgaataggctgcctgcaaattataaagccccaagcaataatcaggcagtatccagtcatccggatctacaaaaaccacatacttcccggtggcgtgatccagccctcggtttcgtgcaacactgactccagagttctcctgatgaaatactctgacacgataatccttagatgcccattcgtcacaaatttctccacaacgatcgggactaccatcatcaatcagcaatagttcaaaatccgcaaatgtctgcgaaagaatactggaaacacagcgcgacaaatattgttccactttataaataggaacaatgacggatataataggttcttctttcatcttgaatttctatctatattatcatatttatagtcaatgcatcccgaaactttttttgaaccggagaaaacgtaacaaagaaatccagcaatcaaagaaaccgcctcccatgtggcaaagaagatatttcgctatgcaatctgctttataatctggcatgaatctttcttctatccattccttttccttggacaataaatcgtccagacaagccacccgctacctgaatgggtagccattagtatggagggatagcagtacacgctgaaaaaccagacttacggagtgcctcaaatagcgggtaagttcatccgacaggcaacaaacgtcctcaaatctttccattctgcttctataagctgaaaaaatattgtactcatcgctgtatgtattcatacgggaagaaagcgtttctgcagaataggctatcctataattatagtccatgaaattgcaaagacggatataatctgaaagcaatatgtaatctatcataaaaatcaaatcttccatgcaatggacattacaatcaaaacataatttattttcacgaatcaattctgcactatatagttttgaacaagaaaatccaaaacggtcaaggccatactccgcgaaaccttcacctatattacttcctatgaatatttctggaagtgtaatctttcctattaacttaccatcaattgaatattttaaagctcctcccatcaccaaaccaatacccgtatcgggcaggctcttatataaatgcaacaaataatccgtggaaacccaatcatctgaatccacaaaaacaatatatgtacccttagcatgctgcaatcctatattacgtgcagcgctaacgccactgttctgttgatggaacacccgtatcctcgtatcctttccggcatactcttcacaaatctccccgcaacggtctgggctcccgtcatctaccagcaacagctcaaaattcgtaaaggtctgtacaagaatactgtcaacgcactgaggcaagtactcttctaccttataaacggggactataacggatatttccgggacatgattcatattcgctcattttgtatgcaacactgccttcatttttatagacaacaccaacaaatagtaggctgactttacaaaagccttaaaatacaaatagccggcatacgtaggaagcacataatggatgttctgcaacatcagcttccattcgggacgcaggcccgtcatctccaacaaagacgcatactttttgttcctgaataccaaataactctgataatgaaaggatgtgtctttcgtgaaatacagaatacggtcaaaatattttgccttcagagtctcaaaaaaaatatatatatcccggttatcctgcaaacaccgagaagaccggataaaatcgtagatataacccagcaccagcacacgacattccaaattacgcatagacggcgcccgcatgatggagtctggctgcatagaataatagtaagtggtctcaccgacgacatacatactttgagccatacatgccaacttaaatgaccataaatcatcctcgtgtacaattccctcctggaagtagagtttatgctgcaaaacgaggggacgactcaccagtttgttccatgccatgacataccattttccctgcacataagtggaaagtacaagagcattcccttcataaaacccggtgcctaatgataaaggaggagcccaacgtctggcaccggtcacctcgtaattgcctatcacaaaatccggtcgcttctgcaccgctgcatctgccaaaagctctattgcattcgcagaaatatagtcgtcgctatccaagaagtacagataatcgccaacagacgctaaaataccggtgtttcttgcagcagaaagccctctgttctcttcatgttccagacatctcaccaccgctccgcgcggatgcgaagccaccacccgtctgactatctccatagagttatccggagtgcagtcattcacaagaataacttccaaatccggccaggtctggttcaacacagacagcagacaccgttctatgtacttggcaacattataaaccggaacaataatggaaactttcatactttcaatcatattttcagaatttcacctcatggccttccacaaactcttcccaccacacaacaagcgtcaacagattgaaatattgcaaagccttgttctgcctatgccagaaccaaccgcccgccttctctgcaacttgttcataatctgtaagaaacttcttcactgcatcacgacgcagatagttgtccataatgccggaagcaagaatgaattccttaaagagagcacgtcgggccctatcacggaagaacagtggcataggtgcaaaaccgccctgcttcttcttcaaggtaatggcctcgggaagtaaaggtttataatggtgctttaacagatatttagaaacggaacgaccccgcgcaatgtccagtacactgctgcccctgcacttcaaccctaccggtagctcctgcaggaaatggaaaagctccaggtccataaaaggatacgtcagattgttaccgaacatgcgtgccatgctggaagccttgaaaagaatgatacggttgattacagtctccaaatcggaaagaatggcatgctgcgcgtaaagatgctcgaaactatggatatcaggccgtagtgattttaccggctcaaaatcttcttccggattttgcagaagggcacacaaggcagagtcggaaaagccgaaacgctccccttccagaatatgaagtatcttatccaaatggaaattgatgcgggaaagctctccgccggtatcaaaggtttcatgctccaccagacggctgatgccacgcagcaagggacgcaatcctatgcgggcggctagataatgcaacgccacttcgcgaccggaagtaccgaaatactggtcactgccgtcacctcccagaatcacgtcgggcttgtcatcgcctatcatgcgcatggcacaatagtttaccatcagcccgccttccataaaaggctcacccagaaaacggacaatgtcgggcaaggcactggtttccgtaccgtcaatctcgtactcatgatggcgcgtgccgaaggtttcggacatcagacgggccatgggcagctccgtccaggcatctcctttaaagcccacggaataggagtcaatctggccgtcgtaaatgctgcgcagcgcagcaaggttggacccggaatcatagccgccactcagcaggatgcctaccttgcggctgtctccgatacgccgacggatggcttgcgcatgcaattctccataacggcgggaataggcctcgacatccggattccgttcagtcgccaccttgggttcatgctcaaaaacgctgtcgcgcttcagacaataaatgtcatctgccaccttctcatataagccgggatttctttccttcagcgaatcaaacatggaatgtacgttcgcttgtgtctctaactttacagaagcccaaaccggcatcagataaccaagctctgtcaacatgtagaacttttcgccggcacctaaagaatgaacatcgaatagggcgaaattattcttcttcaaaatgccacgctgaaggaatgtactcaatgaaaccagattaggctcgaaattttcttccagttggtcctctaaaaattgccaggaagtggcaaaattaccatcaatgtgacaatagacgggataatgcgtgccatgatggtcgcgcaccactccgcattcattttctgaataatatactatggtgaacgaaccgtccagacgtgaaaagccatatgccggatcggatagaaacgcatcggcagcaagcttggcattggtatcatccggagttgcctgcaaggtgtcccgattatacaaagttccgaaaaagaaaagtctcagattataactttcaaaagaagattccggctcttctccctctacacaggctgtacgccaatcttctaaagtgatttttccgtatatcatttgtttgcttatagacttgtttattgtgtatccctttctattccaccaccccatgcctggtatgtataaaggtcttgtttgctcccctcagcttgaagatgtttcctgccatcagcaggaatgtatagggtatcttttgcagggccattgccaggcggctggtgcagaaccttttgggaacggcaacgagcagtgcgacagcgagcaacaccaagagcagccaccacttcagcccccatgtccagcgataaaccgtgaacaacacggagaagaggaacgtgaagcccaccaacagcaggcgaggaatggaaagctgctggaaaagcttgtcgcagaagtcccagttacgcgcaacaagcgccttccacagaaacttggcgaaagtctggcagtagtgccattgtgccgacagccagcggcggcgctgacgggagaaatcaccggtgttctgtatcttctcatcaaatacaaaggtttcgggcagataataaaagcgcttgccgcgatagagcagggtcagctccaattcacggtcgaaaccgcctacagccttgatgtcagccatcgtatcacggaacaagtcataacggaacgccatgccggaaccgataagggcggccgacaagcccagcttggcatgccccaaacggaaaatggtgttattgatttcctcactgatggcatcgagcaaggccatgtcattgttcaggttctttgcactccggtgggtctgcacaatctcgacttccggattggcgaagaggtcgttaatatcactcagataatcgtaagggatgacattgtccgcatcgagcaccaaagcgatgtcataattattaccgatggcagtcatggcggcattcagagatttggacttggtacttttctcaaaatgcacttcaaccaggcggacaggaagcatagcgagggaagcgttggtttcgggctgcatacggtccgaaatgacaaccgtatcaaaacagtcggcgggataatcctgctccaggcatgaatgaacacactcgtgtatcacggcatcttcgcgataggcaggaatcaatatggcaaaacgtttgtgttccttggctggagggggtagaggcaggtcacgtcggcgtgacgccagactgtaaaccaatagatacagtatgtttattgcaaacaatatgtacaaaagccaatcaagtatattcaatatatgttccaaattcagggctatttaagctttagagctgctgcttgtttttaatgggtatccgacacaaagatacaaaaaagaagtagagtttggataaaatatacaaaaaatgcgaagaatataggaataaaaaaacgagcaagctctcacgaacccctcgcccctataagaaaagcctttaaggcttttcttttaaactacatcaatgttacctaaaaatcaatctttctctttacctaaaaaaataaaacttcaattacctattctgaaaacttcaaaatccaattttacctttacctaatttacctatttattcaaaacatttagcttatgaaaaaaatctattttcaatccttttacctaataactaatatcctttattgaaaactgttttattatttatcaaatccaaatgcagtttcccaactgcactgcaaaggtaagtgttttatccgcgcgcacaaaatgccgacacatttttcgcgcgttttataacattgttttagagtttaagagtatagtttacacttataaacaatttgttgttcatcgggagcatactttccagtaaaaaacaagccaccgaaacgccgaaacgcttcgatgactgtcccctttaaacacctttaaacaaaatgaatttcttatttatttcctcgcttcagcaatatagcccaaagcttctttacatttttccgtaacataagtccagtcttcagcagcgaccttatccttcgggaagagtttggaacccatacctacgcagaacacacccgccttaatccaagaggtcaggttttcctgggtcggctccactccaccggtcaccatcagcttggaccaaggcatcggagccagcaaacctttcacaagtttggcaccaagcacatcgcccgggaatatcttgcagagatcgcaacctgcttcttgcgcgaaacctacttctgaaacgctgccgcaccccggagtataagctaccagacgacggttacaaatcttagcaatctccgggttgaacaacgggcctacaacgaaacatgcccccaactgcaaatacagcgccgcagtagcagggtcgacgatggaacctacacccatagccacctccgggcactcttttgccgcaaacttcacaacttccgcaaacacctcgtgggcaaagtcaccacggttcgtaaactcgaacgcacgaacacctccatcgtaacaagcctttacaactttctttgcaacttctgcatccttatgataaaagacgggcaccattccggtagaaccaatcttattcaatactgcgattttatcaaatttactcatctttttatttacgatttgacgatttacgattaatattactttatatctattctttttatttacgatttgacgattcaaacttcctttgctaaccgatttcttgtagtgacaatagaactcactattattttatacaattcatgcgcctcttgttgcaacccaagcagtttattagcaggaatcatctcactttcagcaataatttccaaccagtgtatagtttcatccagttcttcctctaccattttcagtttattcagaaaatccttatcagactttcccaaacaagctgccctataattggcagcaggtgaagtccctgaacgtactatttgtttagctatagccattgacgaaatccgattaggcatacaatctaccatcttgattattctcaaagagaacaccttcaatcgtattttcaattcctccgagttcactgtagaagtaatttcaatcgtacatcgtaaatcgtcaaatcgtaaatgagcttagcgttgtactcgtccgcttgcatcccctcctgccagcgcttctacctcttcggtagaaacaaggttgaagtcaccgttgatagtatgcttcaaggcagaagccgctactgcaaattcgagggcggcaccctggttaagttttgtcagcaggccgtggatgataccgcctgagaaagagtcgccaccacctacgcggtcgatgataggattgatgtcgtaacgctttgattcgtagaattcctcaccgttgtaaatcattgccttccagccgttgtgggtggcagagaaagactcgcgcaacgtagagatgacatatttgaagccgaattccttcgccatcgccttgaagattcccttgtagccttcagcgtccgtcttgccgccttccacgtctgcatcgggcttgaagcccagacagagttcagcatcttcttcattgccgatgcagacatccacatactgcatcaaaggcttcatgatggactgggctttttctttggtccagagttttttacggaaattgaggtctaccgacaccataacgccgtgacacttggcagcttcgcaagccaagcgagtcagttccgcagccttgtcggagatggcgggagtgatacctgaccaatggaaccagtctgcaccttccatgatggcatcgaaatcaaagtctgccgcatctgcctcggcaatggcagagtgtgcacggtcatagattaccttactgggacgcatggaagcaccagtttcaagatagtagatacctacacgatcaccaccacgcgcaatgaaatctgtctttacgccatacttgcacaatgcgttgacagccgactggcctatttcatgtttcggcaacttagttacaaaataagcatcatgcccgtagttggcacagctgacagctacgttggcctcgccaccgccatataccacatcaaaagagtcggactgcacaaaacgggtatttcccggagtagacagtctcagcattatttcacctaatgtaactactttctttcccataatctttctatattttattttaatatgaaattaatttatttcctttcaatttatcattacgaggtataaaaagaacttaaacacttgaaaatatgaatagtaaatcaaaacaacattcattcttcacagtcttcgtgtgcgggcacaaagatacaacaatttttgaaatacaaaaaattatcatatatttgtagcggaaatatcaagattattattgtgcacgagcacaagacatatactctacttggtacattgtaaattataaatatagatggaaagagtcagaataaaagatatcgccaagatggcagatgtatcagtgggaaccgtcgaccgtgtgattcacggacgcagcggtgtgtccgaatccagccggaaacgggtggaagaaatcctgaaacagctggattaccaaccaaatatgtatgccagtgcactggcttcgaacaagaagtacacatttgcctgcctgctgccactgcacgagaaaggcgaatactggacagacgtagagacaggcatacacaacgccgtagagacttattctgactttaacgtcgccgtgcacctctcctactatgacccgtatgactatcattcattcgcggaagcctccagacagattctatcactggagccggacggagtgatgtttgcccccaccgttccgcaatacaccaagccctttacggatgagttgacgcaacataatataccttatatatatatagactccaatataaaggaagagcccgccctatccttctacgggcagaactcgcaccaaagcggatattttgccgcccgcatgctgatgctgcttgccggagaagacgcgcaggaaatcgtcatcttccgcaaaataaacgaaggcatcgttgggtcgaaccagcaggaacgccgcgaaataggtttccgcgaatacatgcagaagcatcatcccgcctgccgcatctgggaactggacctgcatgccaagcgcgacagcgaggacacactgatgctagacgagttcttccaagagcatcctaccgtaaagaacggaatcaccttcaactccaaagcatacatcatcggggaatacctgctgaagaagcagaaaaaaaacttcaacctgatgggctatgacctgctgcaacgcaatgtagactgtctgaaacaaggaagcatcttcttcctcatagcacaacagcccaccctgcaaggattcgacggcatcaaggccttgtgcgaatacctgattctgaagaaggaaatcacaagggaaaacttcatgccaattgacttgctaacgaaggagaatatagagttttattacaataaatagttgcatgtacaatgtaccatctacaatgtacaattcgggcatgcggaaggggactaatactagcgcagcgcagccaaattgtacattgtagatggtaaatggggaatttaaaagatggaggcaaagcacctgaaaatcaatccttccgacaatgttgcagtggctatcacagcacttccggctggtgaaaaactcacggtggacggaaaggaaatcaccttgaatgaggatgttcttgccggacacaaatttgcactgaaagactttgaggaaggcgaaaacgtcattaaatacggatacctcatcggccatgcccggaaagcgcagaagcagggagactggatgaatgaaaacaatatcaagaccaacttgtccgggttgctggaatacacatacaaccccgtcaatgtagacctcaatactacggtcctaaacctcaatactggcgcgccaaacctgacctttagagggtacaaacgcaaaaacggagatgtaggcgtgcgcaatgagatatggattattccgacagtgggctgtgtaaacggaatcatcaaccaacttgccgaaggcctgcgccgcgaaacgggcggaaagggcgtggatgctatcatggcttatccccataattacggctgctcccagttgggtgacgaccacgagaatacaaagaaaatcctccgcgacatagtgctgcatcccaatgcgggagccgtactcgtggtaggcctgggatgtgagaataaccagccggatgtattctgcgagtttctgggagactatgaccgggatcgcgtaaagtttatggtgacccagaaagtgggtgatgaatacgaagaaggcatggagctgctgcgcgaactttatgccaaagtcatccaggaccagcgcgaggatattcccttaagtgaattgcgcgtaggcttgaagtgtggcggttcggacggtttctccggcatcaccgccaatccgctactgggcatgttctccgacttcctggtagcacaaggcggcaccagcgtactgacggaagtaccggaaatgttcggtgcagaaaccattctgatgaaccgctgccgcaccaaagagttgtttgaggacacggtgaagctgattaatgacttcaaggaatatttcctctcacacggtgaaccggtaggcgaaaacccgtctccgggaaataaggcaggtggcatctctacattggaggacaaggccttgggatgcacccagaaatgcggcacaagctacgtggaaggggtacttccatatggcgaacgcctgaaagtaaagggactgaacctgctgtctgctccgggaaacgaccttgtagccgccactgcccttgcctcttgcggatgccacatggtgctgttcaccacaggacgcggaacgcccttcggaacctatgtgccgaccatgaagatttccaccaactccactttagcaaagaacaaaccgggctggatagacttcaacgccggagttatcgtcgagaacgaaccgatgaagcaaacctgcgaacgcttcatcgagtatatcatcaaagtagcaagcggtgaattcgtgaacaacgaaaagaaaggctacaaggaaatagccatcttcaagaccggagtaactttgtaaattgaaaattaaagactgatagatggagggcgggacaaaaccattttgtgccgccctttgtttttgttacctttgcggcggaattgatttcaccacagattaccccgattaacatggaattgattgaaaggtagaaatctgtggtgaaccatcaatctcaaccaaacaatacaactatgtcagcaacaaccgatacaacccctaaaacccaaagcggctggtgggcactcagcccgttggcggtgttcctttgcctctatctggtgacttcgctcctggtgaacgacttctataaagtccccatcacggtagccttcctcgcctcgtcctgctatgccatcgccatcacgcgcggcttgaatctggaacagcgcatctaccagttttccgtgggcgccagtaacaagaacatcatgctgatggtatggatattcatccttgcaggagcattcgcccaaagcgccaagcagatgggcgccattgatgcgaccgtaaatctgaccctgcatatactgccggacaacctgctgctggcgggcatcttcatcgccgcctgcttcatctccctctcgataggaacaagcgtaggaactatcgtcgcactgactcccgtagccgtggggctggcggaaaagacgggcatcgacctgccctacatggttgccatcgtggtgggaggctcgttcttcggagacaatctttccttcatatccgacaccaccattgcatcgaccaagacgcaggactgcgtgatgagggacaagttccgcgtcaactttatgattgtggtaccggcagcacttatcatactgggcatctatatctttcaaggactgtccgtctctgccccaccacaagtacagaccatcgagtggataaaggtaatcccctacctcatcgtactgggtacggccgtagcaggcgtcaacgtcatgctggtactgctgctgggcatcctctctaccggaattatcggtgtctataccggcaccgccttcttcgactggttcggagccatgggaacgggcatcaccggcatgggcgagctcatcatcatcaccctgctggccggaggcatgctcgaaaccatccgctacaacggcggcatcgacttcatcatctcccggctgacccgccacgtcagcggcaagcggggagccgaattcagcatcgccgccctggtcagcatcgccaatctctgcaccgccaacaacaccattgccatcatcaccaccggccccatagccaaggacatcgccatccgcttccacctggaccgccggaaaacagccagcatactggacaccttctcatgccttgtgcaaggtatcatcccctacggagcacaaatgctgatagccgccggacttgccggcatctcccccatcagcatcatcggaaacctatactaccccttctgcatgggagcctgcgccatactcgccattctcctgagataccccaggaaatactcgggagaaggatgagtgataagtgatgagtgatgagtggtgttgtgtgaacatttaaaaaaaacaccctcatgccaacaaataactcataactcataactcataactcaaaatcttttcttacctttgcacccgctattacgagatagtagcataattcaaatcattaactaaaaatattttaattaaatggcaacaaaaatcagattgcaaagacatggacgtaagagctacgctttttactctatcgttattgcagacgtaagagcaccacgtgatggtaaatttattgagaagattggtacttacaatcctaacaccaatcctgccacagtagatttgaagttcgaccgcgcacttgactgggtgttgaagggtgcacaacctactgacacagttcgtaacatcctctctcgcgaaggtgtttacatgaagaagcacttgctgggcggtgtagcaaaaggcgcatttggcgaagcggaagctgacgctaagttcgaagcttggaagaacaacaaacaaagcggtttggctgctctgaaggctaaggaagacgaagctaagaaagctgaagcaaaggcacgtctggaagcagaaaagaaagtaaacgaagaaaaagcaaaagcattggcagaaaagaaagctgctgaagctgccgcaaaagctgctgctgaagcatcggctgaagaggctcctgcagaagaaacccctgctgctgaagaaactgctgccgaataatagtaagcacagcattatcgctaaaaatgggattaaaactataaaaatcctctccggttcatatcggaggggattttttattactatatttgcagctataatcattcattaaaaaaacaagcaatgaaaaagtttacttatctgctcgctgtagccgctgtgtttacggcttgtaacagtggaaacaacggttacaccgtaaccggaactgtagagggtgcagccgacggcgacaccgtatatctggaaaccgtggaaggacgccaattcgtcaaattggattctgctgtcatcaaaggtggaacatttaccttcaagggcacacaagatactgctgtcaaccgctacatctcttacaaagccgaaggaaaagacggcgcagccatcgacttcttcctggaaaacggcaagattataatcaacttgtcgcaggaaaacaactctgccaccggtactgccaacaatgatgcctaccaggaaatcagagcccaaatcaacggtctgaacaaacagatgatgagcatctacgaatccatgtcggacaccacactgaccgacgaacagcgtgaaaccaaaggcaaagagatggaaaatctggaaaacagcatgatatctgccatcaaagccggcatcaaaaagaacatcaccaacccggtgggtgtactcctgctgaagcagaactattactacatggatgtggcagacctcaacccgctgatgccccaaatccccgcagcttacgacaacgacgaagccatcgtcaagataaagaacaacgttgagaaaatgaaagccactgccgtaggccagaagttcacagacttcgagatgcagacgccggaaggaaaaacggtaaaactatccgactacgtaggcaagggcaaagttgtccttgttgacttctgggcaagctggtgcggcccctgccgtcgcgagatgcccaacctggtggaagcttacgccaaatacaagaacaagaacttcgagattgtaggcgtatccctggaccagagtgctgacgcatggaaagaagccatcaagaagctgaacatcacttggccgcaaatgtccgacctgaaatactggaactgcgaaggcgcacagctttatgccgtaagcagcatcccccacactgtgttgattgacggtgaaggaactatccttgcacgcggattgcacggtgacgaacttcaggaaaagatagctgaagctgttaaataataaagccggacacaccggaagctaaagaagaatgccacacttcgcaaaggcaaatgctattgattgcgccttgcgaagtgtggcatttcaattgataaaatgtggcatttcggtcaatgaagtgcggcattcgggatgatgaagtgcggcattttcaagagaagatgcgtgccgccatttccatacccaaccgtacggtttcccactgcttttcctcatcggcctccgaaggggaaagaagcgcattcgcatccggcaggcacaaagtgaaacgtttcaaggggatatagttcaacacgctctcggtcttcgcctgcaattcatccagttcgtcttcctggggataatgggacagcacgaaaccgaataccgcctctttctcgtgtataaaccagagcagacggttgcggtcgcacgcgccacagtcgtaattcaagaaataggcatcggccccatgcagctgcaccaacatatccgtaggtgcatggaatgcaacatacatccctgcaggacgctcgcgcaaaacacggttattcagccgaacggtatcttccattatcaccgaatgcaccccgtcgaactggacgtagcgacaaccggcatcatagagttgggtaagcaaaagtttgtagcaggaagcaatatcatccgtcaaaagccgaatgtcggaataaacggtttctatctgagtccgctccacgcgttgaataatctgggtcaagagttctgccggcgaggggatatgctgtttcttcatcacctccccacccgcaatggaatcaagaaatgcaaattcttccagaaccggatgccggagcaagccgagccgttccgtaacctccaaaggagaaccttcggagaaaaactggccgtctttggaacggataccctcccagctttccaaaaaatcacgacttcggaaaccaccgtcggaaaccaccttcatgcctccctgttccagccgttccacaagattgcgcactgacgcatcttcaaccgcctgcaaagcctgccggctcacttgtccgttctgatattgctcgcgggcatccttcaatgcacgaggtacgcaaaaagctccagcgatgtctattttaaacggaggaaatacatttgccatattcatcctttctttgattattaaaataatgatacttcagcccctatgccacgggcaataaagcaatacaattgaacggtaacaagagacattatcaaggattgagaaccttaaataaaccaattcgttacaaatataactaaagaatccgaaaatccacaatccgctccaaagatttatcttcatttgacacttgaaaattcagagaatgctcaagtatacaacaacagcctataacgaacaactttaaaaagtaatttttattcaaagttttctatttacaaataaaacaccactaattatcaaacgattaacactttttaaatcacaaaaagtttcccaaaaagtaaaacctatcaataactataatacctttgtttccgcatttaaactaaatagatagtcacatttaagtataaaaggttatgatacagacagtactcaagcgcgacggacgcgtcgtcggattcaacgaagaaaaaatagccaccgccatccggaaagccatgttgcatacagataaaggtgaagacctgcaactgatacaccagattacggaccgcatctctttcaagggggattcgcagatgacggtggaagccatccaggatttggtggaagtggagctgatgaagagcagccgcaaggacgttgcccaaaaatacatcgcctaccgcaaccagcgaagcattgcccgcaaggcaaagacgcgcgacatgttcctggagattatcaacatcaagtccaacgacatcacacgcgaaaatgccaatatgaatgctgataccccggcaggcatgatgatgaaatttgccagcgaaaccaccaagcctttcgtggacgactatctgctgagtgaagaagttctggatgccgtcacccagaactatctgcacatccatgacaaggattattatcccaccaagagcctgacatgcgtgcaacatccgctggaccatattctgaaatacggcttctctgccggacacggcgaatcgcgcccggccaaacgcatcgagactgccagtatcctgggatgcatctcgctggaaacagcccagaacgagatgcacggcggacaagccatccctgcattcgatttctaccttgccccctacgtgcgcaacagcttcatcgaggaagtcaagaacctggaagaactgaatggaaaagactattcccatctctatcagaaggaactggccgactatctgctacagccgttggacggactgacggacgaggaccgcatcgtgcagcatgctgtcaacaagaccgtatcgcgcgtgcaccagtccatggaggcgtttatccataacatgaacaccatccactcacgcggcggcaaccaagtggtgttcagctccatcaactacggcacagacacctctgccgaggggcgctgcatcatccgcgagctgctgaaaagcacctatcagggggtaggaaacggagaaaccgccatcttccccatccagatatggaaaaagaaacggggtgtgagctacctgcctgaagaccgcaactacgacctctaccaactggcctgcaaggtgacggcacggcgtttcttcccgaacttcctgaacctggacgccaccttcaaccaaagcgaggactggaaagccgatgacccgaaacgctaccagcatgaagttgctaccatgggatgccgtacccgtgtattcgaaaaccgtttcggaccgaagacctccatcggacgcggcaacatctctttctctaccatcaacatcgtccgtctgggcattgagtgcatgaacatcgaagacaaggaacagcgcatcgcccggttctttgccaagctggatagtatgctcgaagtgaccgcacgccagctgcacgagcgcatggagtttcaaaagaccgccttcgccaagcagttcccgctactgatgtctgccttgtggataggcagcgagaagctgaaaccgaacgatacgattgcttccgtcatcaaccagggaacactgggaatcggtttcatcggattggcagaatgtctcgtggcattgctcgaaaaacatcacggcgaatctggcgaagcccaggagttgggactgaaaatcgtgacctatatgcgcgaccgtgccaaccagttctcggagcaataccagcacaactacagcgtgcttgccactcctgccgaagggctgtcgggcaagttcacccgcatcgaccgtaagaagttcggcacgctgccgggcattacggaccgtgactactacaccaactccaaccacgtgcccgtatactacaaatgcagcgcccgccacaaagcggaagtggaggctccttatcatgagctgacccgcggcggacacatcttctatgtggagatagacggtgacgccacccacaatccggaagtcattatgcgtgtagtggacatgatggaccaatacaacatcggctacggttcggtaaaccacaaccgtaaccgctgtctggagtgcggccacgaaaactccaccccaaacctggaagaatgcccgaagtgcggcagcaagcatatcgacaagctgcaacgcatcaccggctacctggtggggacaaccgaccgctggaacaatgccaagctggcagagttgaacgacagggtcgttcataattaaaaattaaagggctgcgcagtgcaaagcggagcttcatttttaatggttgacgtttaatttttaatgattaatgttcagctttctacctgcgatgtttaatttttaatttttaattccctactcatgctttctattctcgacattttagaagataccacagtagacggtccgggcttccggactgccatttatgctgccggatgccccaacggttgtcccggttgccacaatccggagtcgtgggacatcaaccgcgggcactggatgagtacggaagagattctggaaaaagtccttgccgacaactttgcagacgtcaccttcagtggtggagacccgatgttccagccggaaggattcacccaactggcgcatgccatcaaggagcggagccggaaaaacatctggtgctatacgggctatactttcgaaaagctactgcgcaacccgcgccaagcccaactgctgaagtacatcgacgtactggtggacggcaaattcaagaaagaactgagggatgaggaactctatttccggggaagccgcaaccagcgtctgattgacgtacagacatccctgcaaaagggggaaaccgtaatttaccactataatccccaaaagggcatttaaaaaagtatcccgtcattcttcgcttcgctccgaatgacgggatacctacatcaccattctataaatttccctctttccctgcgcttctgcagctcctcctgaagaaagcgctgcctatccttggcgatataccggcgggcaaaaatattgggcaccgctacccccagcgctatgcagagaataatcagtgaagccgtgatgccgttggaaacaaccgccgtcacctcgcctaccacaccgtgcatattgataagcccgaaaagcgaacgatacatcaacactcccggaatcatcgggatgacggaaggaatcgtcaagacgtgattgggaacatggaaccaatgcactgccttcacggctatcaggctgacaaccatgctgcccatgaacgaacctatcaccggtccgtaacccagctcgaaattgacaaagttacgcgtacaaacggcgatgataccgcccaccgcaacaacccacaacaagcgccgctgtatattgaatatcatggaaaatcccatggcagctatcgccgccgcaatggcatacaccagataactatcatgaggcaccatactcaattcgctaaacttcttgtcaatcacaacatcctccaccgtcagcagacgcatggctatcacaatgccgaaggccattgcacagaccatcagcaccgtattcacagcccggacaatgcccacctggatataattatcaatcatatcatccacaaagtttatcaacggcacacccggaacaatgaacagtgcacacgccaacaacggatgatagggagtttccgagagtccggcaaaagaagacacataggccaagcaggtcgaaatcaatgcggcaatggcaatactcatatagtgattgatgccgaactccatacaacggacacggacgcgaaaaccggcaaaagcgcagatggaggtaaacagaaacgccatccagtcaccaccgaacagcttgcagaaacctccgcaggcaaagccagcaccgatggcaacaacgtatggcacataattccgcttcttgtttttgattctttctagttcctcctcatactggtcgagggagtagtcattctcaatggcccgccaggacagtttgctgatttcggaaatggccgtcatgttgatgccatgcttctcgcacttctggaatttggagaacgaatgcaggccgtcgctcacattcaccaccagcatggtataacttacgtcgatgtggagcttttcttccggcagccccagataggcggcaacacggttcaggttacgaacaacacggtttgtatcagccgcactctccaccagcagctgtccggtacgaagcaataaatcgagtttcctgcgcagcagggcaatctcttgttcagtcaaagtcttatccatgaatctttttacctattttttttggaggcacaaagataggcaaaatgtagaaaacgatttcattctttcggcagaaaactctacctttgcagccgtttttttaatggacacaaatggaaatattctggaatactatcgcacaatacaacgaggccacctggtggacacagctcctcatcaccgcagcaggtatcctgctcaccacgcagctctaccggaaaccgaccttatgggcaaaacgctccatgaaaatctacatggtatttctgaacgggtggatatccgtcgtgtactacatgatgtattgcggagcgcgcggacaccactatatactcgccatcttctggggagtgattgcactattgtggctatgggatttgtttaccgactacactccgttcgagcgcaacccgaaatacaaagtactggtgggggtactctatgcaatgcctttcctctacccgctcctttcgtgggcacgcggaatggaatttcccatgatgaccaccaccgtgatgccctgctcggtagcagttttcaccatcgggctactgctggctttctcgcgcagggtcaacctgctcgtcattctgttcctttgccactgggcgctcatcgccttttccaaagtctacatctacaagattcccgaagacctcctgctggcaagcgccaccgtacctgccatctatctgttcttcaagaactactttgaacagaacttacacaaggaaaccaagctgggcgcacggctcatgaactgtttccttatcctcatctgcatagtggtcggggtactgctcagcatgacgctgcttcatggaatgaaaggataaagaaatagagcgcttccgcgcaccaaaatcatttcttctttccttgattggccacagcctccattaatttctttatctcctcagggttacccaagaaatagtcttccgtcaagttcagctcatcatcaaactcaaaaacatagggcaccgccgtaggcaggttcagatgcacgatttcatcgtccgaaatatgcttcagatgtttgataataccccgcaggctattgccatgagccactaccagcaattcgtcggccgtcttcagattcgggaagatgatacacttccagtaaggcatgatacgctcaatcgtatctttcaacgactccgtacggggcagttcggcatcgggcacttcttgataacggtcctcaaaacgcggattacgtgggtcatcctcggccaatgcatgcggagccacatcaaagctacggcgccataccagcacctgcttgtcaccgtacttggcagccgtctccgccttgttcaatccttgcaactggccatagtgtttctcattcaacctccacgatttctccaccggaatccagtcctggtcgaggcggtccagcacacaatccagtgtcttcacggcacgcttcagataggaagtatacgccttcttgaagcgaaatcccttttctgccagcagctcacccgcccttacagcttcagcaacgcctttctctgtcaaatcaacatccgtccaccccgtgaagcggttttccttattccatgcactctcgccgtggcgaagcaaaacaatctttttcatatagtctcctttcagttttacctatagaacacccggctacctcctcttgttcatgcaatagcggaccacatataccaaaagtatcagaaacgccacccacaccatgctgatgaccggcaggtagcggttatacaaatattccccttccttcgggacacggttgaaagtacagattatgcaattacagcacgcatcgagtgcatcatgcgagaataccgaaaaaacaatgatagccacccccgcaagaagcatcatcaaagtcccccacaccagccacttaccagccacggaaggatggaattgcgaatgagtggaatgtacgaatctaaccataagcgcttgtctattattaccggtacaaatgtccttcatttttaacaatccggcaatacttacttttcatcaaaaagagagtctaccatcccaattagtaggtaaccgcaacctctatagaccacgcaacaagctaacacgaaatggggagtggcacaacacccaaagccctacatgtaggtatttcacgttctccggcaaagcctttactttgcagcaaacaatttaatcactttatttacaatgaaaaagactggtgttttttatggttccagtaccggaacctgcgaagagttggctaaccagatagccgaaaagttgggagtttcctccaccgacgtacatagtgttgacaagatgaccgccgataaaatcaaggagtatgaagtgctggttctaggtacctccacttggggagacggcgaactgcaggacgactggtatgacggcgtaaaggtactgaagagcaccgacctttccatgaagctcgtagccctattcggttgcggcgactccgaatcctactgcgacacattctgcgacggcatcggagtactctacgaggacttgaaggatagcgggtgtaccttcttgggcaacaaagtcagcacggacgggtattccttctcctcttccatcgccgtggtagacgatgcattcgtaggacttcccctcgacgaagtgaacgagagtgacaaaaccgccgaacgcattgacgcctggacagccgaaataaaaagcaagctctagaaaagaaacagaccatccgtttaaagtaaacggatggtctgcctgcatcatgcagatgatatctttcatctgaacagacaatgtgttctgccatatcgcaaacacattatctgttttttatgctcttatacgaaccagcgaacgtagcagaagtcttgacggtgaggcaggtctgcattcttcgggaacatacggtaagaaaccttgaagctacccgcattttccatcttgtgcttagcttggaaagtataaaggttaccttctttcttcactacattgaacggttctacggagtaaacgtgctgtttgccatcctgagccgtataagtagtcaccagttccagaccgatagcatcgttcaagcccttctcgtcgataacgtaagtaatggtgtattccttaccgctctcgatggagcctttcaccaggtcttcagtcttttcgcaagacaccacttcaatgctgtcccatttttcggcaacttcttccttccaggcagctatttccttagccttggcataaccgtcggcagccagcatcttgaaacgtttggcttccttgatgtagaacttatcgtaatagtcatccaactggcgcttcattgtatagtggggagcaatctgtgcgatggagttcttgatagtcttcacccaaccttccgaatatcccttcttgttacgtgcatagaacaacggcagaatttcctgctcaagaatgctgtagatagtagcggcatcgagttggtcctgatgttcctgattctggtaagtacgcttttcggtcaatgcccaaccggcaccttcgcgatagccctccagccaccagccgtcgagtacggagaagtttacaacaccgttcatcaacgccttctcgccggaagtaccggatgcttcgagcggacgtgtcggagtgttcagccagatatccacacctgaaacgaggcgacgtgccaactgcatatcataattttccaggaagataatcttacccaggaactccggacggcgggaaatctcgatgattctcttaatcaagccctgacctgcaccatcgtgcgggtgagccttgccagtgaaaaggaactgtaccggatagtcagggttattcacgatcttggacagacgatcgaggtcggtgaacagtaagtgtgcacgcttgtaggtggcgaaacggcgtccgaaacctatcagcagggcattcggattgattttgtccagcagggaaacgatgcgtgagggatcaccttgattcttcaaccaagtttcacggtattgcttgcggacatagtcaatcagtttgttcttcatcaccatgcgcgtcttccagatttcttcgtcggacacgttatagatagcctcccaaatcttggggttggactggtcgtagagaaagttttcatcaaaatgcgcagcatagagatgtttccactccgtagcgctccaagtggggaagtgtacaccgttggtaacgtagcccacatgactttcttcggggaagtagcccttccagatggaagcgaacatctcctgggaaaccttcccgtgcaaccagctcacaccgttcacctcttgagaagtgttgcaagcgaatacagacatacagaaacgctcgcccttgtcgcccggattgttacgtccgaggtccatcaggtcatcccagctgatacccattcttgaaggatagccgcccatgtacttgccgaaaagaccttcgtcgaagtagtcgtgaccggcaggaaccggagtatgtacagtatagagagaagaagcacgtaccaactcgatagcctggtcgtaagtcagaccttcggccacgtagtcacagatgcgctgtacgttgatcaaagcagcatgtccttcgttgcagtgataaatatctttcttgatgcccagcttcttcagcgtcagaataccgccgatacccaacaaaatctcctgcttcagacggttttcccagtcaccgccatacagttggtgagtgatggaacggtcgaactcactgttcatttcattgtctgtatcaagcagatagagggagatgcgtcctacatttactctccacacataagcatgcacgtagtaatccagataaggaacatccaccaccacttgttgtccattctcgtccaatacacgatcgatgggtaactgtccgaagttttgcgcctcgtagttggcgatctgctgaccgtccatagacaaggtttgggtaaagtaaccatagcgatacaagaaaccgactgcacacaagtcaacgttactgtcggaagcctctttcaaatagtcaccggcaagtacgcccagaccaccggaatatatcttaagtacgtggttcaaaccatactccatgctgaaataggcaacagacgggcgcttgctgtcaggcgtcacatccatgtatgtacggaattttgaatatacatcttccattctgcgcagaataaccttatcgttggcaagcgcttcaagtttggcataactcatacgctccagcagaagtacggggttctgtcccacttctttccaaagggcaggttcaagatctctgaagagttcggtggcttcataattccatgaccaccaaatgttacgtgccagttcagaaagtttctccagttcggcaggaatgtgcgatttcacattcacgtctttccagttaggagtgtttacattactaactttaatcttcattgtatgataactaattgattaataattcttttatcttaattgacgcttcatggcgttgcacagcgcaatatcataagcctcatagtaatactttataaaatgcttccataaggcctgctctgccacctgacctgcacgtttacggatttccttgatttcggcttctgtcttggtcgagaacaaggctacggtatcctttatgccgtctgccacttcggaataattgtaatccgaacggtgcagcacctccactccgtcgtcaatgccatgctgattcttcagactgttcacccaaagtccaaaaccggcaaggtcggtggtgatagtgggcacgcggaaagccacgctttccagcggggtatatccccatggttcgtaataagacggataaacactaagatcttcgcctaaaatcaagtcataataatgcttgttgagaataccgtcgtggccatcctgatagcagggtacaaaaatcactttcaccttatcttcgggacgattgcccataccgaggtatttcagcatatccagcacctggtcgtgcgtcatattgtgcagccagtgagtgatgaaagggcactgtaacggctcggtaaacttatccttgctcttaaggcgtttctgcaaatcctcgcgggggtctcccacccaactaggcacgttgacaaacgccaatactttctttttcaaatccttatcccggttcagcctattcaatgattccaggaacacatcaatgcccttattcttgaactcatagcgtccgctggtaccgataatcagcgtatcatcacccaagtcctcacccagcaggcagtttgccacacgcaacatggtggaacgggcacgttttcgcttgcccgtgaaagtggcgcctttcggtacaaaatcatcttcaaaaccgttcatcagcacaacgtccgcaggcttgtcaagcaactccttgcattcgttgtttgtgatttcgctcacggtagtgaagcagtccacataatgagccgtctgcttttctatggaatgcttagactgcatattcaactcctccgccatctggtcgccgttgtaagcgaagagataatcgtagagcggcttattgttgcctgctatggaacggccgatggacgtggcatgtgtggtgaagatagtccctatctcgggaacggcagactgaagatagagggcggccataccggtcatccactcgtgtgcctggaacaccactttgtctgtttccgtcagattatagcggtagaaactctctatcacctttccggtagcgaaagcaaacatggatgcttcgtcataatcgccatatccatgcagcgaatccacttgatagcggttccacatctctgtataaatctcatttttttctgcaaagaacggttggaaatcaaccaatataacaataggttcccccggaatgttccagcgtcctacacgaacagagagattgtctttcaacgcagcatattttttccacgctgcgcaaaggttatcagactcaatgaacaaagggttctcttttccctgccagaaatccggccctataaagaataatctatcgcgaaatttagtctgtaaagtatttgcccttgtagacaaaaccgtatagataccgcctactttattacacacttcccagctcgcttcgaagatgtaatcgggggtaagtagttctttagtcatattatgttataatctctttatcttaattacggctgcaaaagtacgtattattctttgaaaaatagccttttaatcgaaaaaactgattaaatatgcataaacaatcgtttacggaatatcatagtttagccacaaaagcctcatgggttcgcccatccctgcatttttcgtctaaacttcccgaagtttagacggagaatccctggagttttcagttgaatccccaaggatttaaacaaaaagctccagagatttcagttgtaaatccctggagcttattttcttataatccggattataccatcaatgcagctaccagcgccaaaatagcgtagaattcaggaagtgcggcgtaaatcattgtattggtctgtacgtcgtgtccttgtgagatacccacgataccgctggcacaaatctgtccctgacggatagcggagaacagacataccagcccgacacccagtccgatacccagcatcaaagggccgtccgtagcaaaatccctgcccatagacatcaggaaagccacgaagccgtaaagtccctgcgtagccggaagagccgacaaaatcatataacttgctgacttggaagggtctttcttcaaagctccttctgccgcactaccggcgattgttgtaccgaagcaactgccaattcctgcaagggccaacatcaggcccagaccgagataacctaaaatttcattcataatgtttctatttttatttgttttttaatttgtttatttctttactactgtaaaaggtttgtaggcttcgcccttgccttcgtaaccggaattcttgaagtattccacgaatgtcagacggagaggatggacgaaagcgctcaggcaagacatggcgatattcagcgtatgcccgaatatcagtatcagtccgcagaacagccagcccagggcaggtcctgccgcatcgttcaccatgaaggcaagctgattgaacacgccgccaagcataccgcctgccagaccgagggcatagagacggatgtaggaaagtatatcgcccatcagtccggttgccatattataggtgtcccataccccggcaccgatgttgacaaatacattccggtggatgttgttcagcaggtagatgccaatggcggaaacaccgccaatcacgatgaatgcccatgtagacacatcttccgaaattatcttgaagaaggaaagtccgccggtacagataaatcccactaccagcaacagccatccccaggcactgagcgactccttgaagccgaagcgcacggtctgccccactgccttcaccgtcatggcaatacagatatgtaccgcaccgataatcagcgccagcagcatttgtttgtcataggtggtctcgcctatcttgcccacaatcatgaattccttcagtttggcgggtatctccaggtcgaagaggcttacaccgaagaatgttcccagtatggcaccgatgacggccgtgaatatacccagcgtaatcaccagattcatcatgcctttcatggactcggacatcttctttttcaggatgaacccgagtgctatcagcaccaagccgtagcccgcgtctcccatacagaaggcaaagaagagcgagaagaacggcgcaagtattggcgtcgggtcgaactctgcatagtcgggcatgccgtacatttttgtaagcacttcgtacatgcgtgtataggcgttgtttttcaacttgatgggagcgttgtcctcgcgtctggccgcccttatctcataataagtgccgttttcatcgagaagtttcctcacatccgcctcgcagtcttcgggaatccagccttccatcagcactacggctccttccgccatctgctcgctgttcagcttgactttcagcaggtctatttctccttgaagctggaggttgtatttctccaacgtacagtaattcgccttgcagaagtctttcagcccggcatgtgcctgcacaagggcttcttccgtaccggctttcttccggctcagctcggagaggctgagtgaaggcagacggagcggttccacatccagctctaccggctggggagtgacggtcacaaaataaagatgtccgccgttctctttcaccacgatggcattgtagtcctctgcccacgcttcgttatagtctttctccgggcaggtgtagaactgcacgaaccagccggcatcttccagccggcggatggattcccaatcgaaatcaccccaagcctccatctgtgccacgtccttgtcaatggcgggaatctgctggttcaagtcttgtatacgtgcctgcaaatcctcataggatttcaccaaagcatcggcagacaactctttatgcaccttttcttccggctgtttgtccgccagggtgtacatgctctgaagcatattcttgtagagcgtacgcttctgcatgaatcgctgcaaggtgtcgtccatctcgccgcactgcctttccacaacgtgcaccacgcccagttcccggatctgtgccagaaacgcttcgtactccttatgatacacaaggaacgtgagcttcttcattttcgtaatcatgcctctgcctccttccttttctcctgatgggacttcatgattttctgcgatgacttggagaggttctcctcgtcttccataaaccgcttgattttgcgcagagcatcctgatagcccggaatctgtactttctcaaaaagattcaccttctgggtggtctttttacgcgcatgttccaacaaattcaacttggcaacgataaattcacgctcgatggcagtatgtgccagcgacttgagcagatgcaacccgtccgcataccatttgggcgcattgaacaagctgtagggacgtatctcgaaatctacattctcgagcaatggcacccgtacaccggcaatcttcttcacaccgagatgaacatcgctgacctttatcaatgaagcgtcgaactcattccaaagggcgaacatggcttcgtaagcttggatttccttttccaacctcgcatccagcgcggcagcatcgcccttgcaacgcttcacttccatacgcagggcactctccttgttcttgatgatggggagtgtacgcacgcgcaccttcagttgcttttccaactgctggagggaggttttgttatattgaaacttaatagccattttatttacgatttaacgatttacgattagacgactgaagctactcaatttctcaatttacagatttacaatttcagtaatatcaatcgtaaaccgtaaatcgtctaatcgtacatttatttagtttgctttcggccagaactggtccacaagctctttcttgatattcacctcttccggacggaaatacttgccgaacagactccatgccacatcgagcatctctgtggtatcgaggttgacatcgatggccagcagctggttggagtagtccttggcaaaggcaagggtacgttcgtcgtagttcgtcaggtcgaaaccgttttcaagcttggttttggcgttggcggcatcggcgtacagacgtacggcggcattcatcacctgcggatggtccttacgtgtctttttgcccgtaacaagctgcttcagacgggacaaggaacggaacgggtcaacgataaccttaccgatgtcgctgtcacgacggaggaacaactggccttccgtgatataacccgtattgtcgggcacggcatgcgtaatgtcgccaccggacagagtcgtcaccgcaataatcgtgatggaaccgccgcttgggaattgcaccgccttttcgtatattttcgccaagtccgaataaagggaacccggcatggagtccttcgaaggaatctggtccatacggttggacacgatggcgagcgcatcggcgtaggaagtcatatccgtaagcagcaccagcaccttttcattattgttcacagcgaaatactcggctgccgtcagtgccatatccggaatcagcagacgctctaccggaggattctcggtggtattcataaagctgacgatacggtcgagcgcaccggcattggagaatacgttcttgaagtagaggtagtcatcgttcgtcatacccataccgccaaggataatcttgtcagtctccgcacgcagagccacattcgccatcacctggttgaagggctggtcggggtcggcaaagaacggaatcttctgtccggacaccagcgtattgttcaggtcgatgcctgcaataccggttgcaatcagttccgaaggctgcttacggcgcaccggattcacggacggaccgccaatttccacctcctcgccttcaatggccggaccaccgtcgatggggtcgccaaaggcgttgaagaaccgtccggcaagctgctcgctcactttgattgtaggagccttgcccaagaatactacctctgcattggtgggaataccttccgtaccctcgaacacctgcaaagtcacttcgtcgccggcaatcttcaccacctgggcaagtttgccgtttacggtcgccaactcgtcataccccactccggttgccttcagcgaacacgtagctttcgtaatctgagtaatcttggtatatatcttttgaaatgcttttgttgccatctatttatttacaatttagcaatttactatttactatttaaatctctgccatcctattctactattttcctatctacaacctccgtacacctgcatccgcaaggcaaatagtaaattgtaaacagtcacatagtacatccttaggctttacgttcctcaaccagttcctgcaactgcttatggaacttctcgtattcttccgacttaaacttcgagtagttcatctgcttacagatgttaatcatcttcttgaagtaatccattacttcgttgaagttgtcgaactcaaattcggtatgacagatttctattaccatattcagaatctcctcctgacgctccatcggagtcacggcatcaacttcgtcaaaggcatcctgctgcaggataacgaagtcaatcagttccgatttccagaaagtcacgtgatattctacgggcacgccgtcgtcacccaggatgttgatttgctcggcaatctccttaccacgctgcaaacgggtcttgatttcattcaccttgccaatccaatcaccgttgatgtgcttggtgatatactcctcgaattcagggtattcaatgtatttggaatacgagtcaatcggatttacggcaggataacgcttcttgtcggcacggtcctgctcaagggcatagaagcagcgagccaccttcttcgtattctcggttaccggctccttcaggttaccgcccgcaggcgataccgtaccgatgaaagtaatggaaccggactcgccgttgttcagcttcacataacccgcacggccgtagaagttggagatgatggaggacaagtccatcgggaaggcatcgggaccgggcaactcctccatacggttggacatctcgcgcaatgcctgcgcccaacgtgaggtggagtccgccatcagcagcaccttcaatcccatgctccggtagtattccgcaatcgtcattgccgtgtagacagatgcctcacgggcagccaccggcatgttcgaagtattggcgatgataatcgtacgttccatcagcttccgtcccgtatgcgggtcaaccaattcggggaattctgtaaagatttccacaacctcgttggcacgctcaccgcaggcagcgatgattacgatgtccgcttccgcctgttttgaaatggcatgctgtagtaccgtctttcctgtaccgaacggaccggggataaagcccgtaccaccttccacaatcgggttcacggtatcgattacgcgcacaccggtttccagcagtttgaaaggacgcggtttttccttatagttggtcatggcacgcttcacgggccatttctgtatcatattcacccggatgtcattgccttcgccatccgtcagcactgcaatggtatcctcaatgctgtaatcaccttcctttgcgatggatttcacggtgcacacacctttctgttcaaaaggcaccatgattttcagaggctggaagttctcgtccacttgtcccagccaggcagcggcttccacttggtcgcccacctttgccaaaggcacaaaatgccatttgcttcctttatccagcggataggtatattgcccgcgtttcaggaaaacgccatccatcttgtcgaggtcgttttgcagaccgtcgtagttcttcgaaagcataccgggccccagtgtcacttcgagcatatgtccggtaaactcggcttcggcccccactttcagtccgcgggtactctcaaatacctgcacgtagacctgggtacctactaccttaatcacctccgccatcaacttgtctcctccggtcgagatataacaaatctcattctgcgctaccggtccgtcgacgacgagggtcaccatgttggctattacgccactaacagttccttttgttgccatatatttttagttgtttattttatctgaattctgcgggtatctgcacatcgtctttcaaggcagcgataatgctgcggaacagttggttacccttctctttatccaacgaaatccaccgttctatcatctccagctgtagcaggaagacaaacagacgttccacggtaaagtaatcgaagaatgtggcctcctccatccagtcccagcgaagctggtccagcttcttttcccggtccaccagttcctccgtctcgctgattttcaccagctgctccagataatccacctcagtacccagaccgaagtcacgagcattggaagtacgcagagcctcgcacacttccgtatcacccacaatcagcggagcaatgtccagcttgaacttacgtgctgtgagcgccaccaatatattattgagagtgaggttgaaaccaaaccaggaagacacaaactgattcttacattccatggcataggcgtaatagagcgctgccaggcggtcttcatacaagaaaccgtcctcggcaggcaggctgaagtattcggaaatgaacgtggagagataagatgggaatacactgtcagagacttcgtcgccatccttcagtcgtgagatatattccgccagttcctccgacgaatagtttccgcgcgggtcgatggcagcatccttatccttcaatagtttcaagacattcgcattgtcgaatttcagataaaacaaatctatcaactttttatcatcttccgacaaggcaggatatagttccgtcctgaaatcggctactgtatagctcagtttactgtcttccagagtaagttcaggcaaaccggctaccaagtaatagtatttactcataatcctgtgggagtttttagaacagcatttccactaattgcggacgcaggaattccttgaagtaattcataaattcttcttcgccgaagttcaccttgtacgaaccatcggcaggcgatacggagaacaaggttttgatgccattcacttgctcaatcttcacacccttgtccagcaggtctttcgccttcgctgcgaaatatttcgtcaagccttccgcatccgcagtagagataacgattggttcgttcacactccatttggacgccaatgcaacgatgaaggcattaagataattcttgtttgcagcaaatgcctttacatcggcattcacaatgttgtccgtcaccaacgtagcgatttcggacttcagagcattcacagcctgaccggcaaacaactttaattcagattttgtattctctgccagttcatcggcagacttatgggcggtagccacgatagaatccgcttccttacgtgcatcctctataattctcttggcttcttcctgagcttttgcgataagtttctgtgcctcttcatttcctttctctacgccttcgcggtagatcttatcggtcagctcttgaatcttgttttccatatttgcaggagttattatatgatttatattacaatattaattgcgtgattttttcccttcctattagattcacgccaaatttacaaaaatccatttgatattgaatagaaagaaaggaagaaaagttcttgctcttccaaaaaaaactcgttttacaccaactttgttctgtaatgataacaaaagaatgacaaaagaagcagaaaatacgtctacaacaacgcatggcaaggattaaggggagcagttccggaggtatctaaaacgaacgaagcctccgtatccttatcagacacggaggcttcttctgaaaaacggcgactacctactctcccactgttacgcagtaccatcggcgtgaccgggcttaacttctctgttcggaatgggaagaggtggaaccccggtgctgtagtcacctgaataaggtagacatgatgcgaaaaaagcaaagcattcatttatggctgaacgtatatacctccatacaaggcaaggcaaaaagtgaacgggcaattagtaacgctcggctatgacatcgctgcctgtacacctgcgtcctatcaacgttgtagtctacaacgaccctgagaaatctaatcttgtggctggcttcgtacttagatgctttcagcacttatccaatcccgacttagatacccggcaatgcacctggcggcacaaccggtaaaccagaggtcagtccaacacggtcctctcgtactagtgtcagagccacgcaaatttcatgcgcccacgatagatagagaccgaactgtctcacgacgttctgaacccagctcgcgtgccactttaatgggcgaacagcccaacccttgggaccttctccagccccaggatgtgacgagccgacatcgaggtgccaaacccctccgtcgatatgagctcttgggagggatcagcctgttatccccggagtaccttttatcctttgagcgatgtcctttccatacagaaacaccggatcactatgctctagtttcctacctgatcgacttgtgagtctcccagtcaagcgcccttatgccattacactctgccgacggttaccaatcgtcgtgagggcacctttagaagcctccgttacgcttttggaggcgaccaccccagtcaaactacccaccaaacagtgtccccgcaacagcgggttagaactcaaataatcaaagggccgtatttcaacagcggctccacgaacactggcgtgcccgcttcaaagcctccggcctatcctacacatcaattacccaaattcaatgttaagctatagtaaaggttcacggggtcttttcgtcccatcgcgggtaatcggcatcttcaccgatactacaatttcactgagctcacggttgagacagcgtccagatcattacaccattcgtgcaggtcggaacttacccgacaaggaatttcgctaccttaggaccgttatagttacggccgccgtttactggggcttcaattcaacgcttctcttgcgatgacgtctcctcttaaccttccagcaccgggcaggtgtcaggctgtatacttcatctttcaattttgcacagccctgtgtttttgttaaacagttgcctggacctattctctgcgcctcaattgcttgaggaccctttatcccgaagttacagggtcagtttgcctagttccttaaccgtgaatcactcaagcgccttagtatattcaacccgactacgtgtgtccgtttgcggtacgggtaccgtaaggattaagtttagcggattttcttggaagtatgattacacgcactattggattgtccagaaggacgctccatactgtcaggttcgactctcgttccggatttgcctagaacaatcaacatctacacccttcaacggactattccgtcagtccgcggcgctgtcacgactccgtctccacgtcactccttaaggtagtaccggaatattaaccggttctgccatcggcctcgccgttcggctgagccttaggacccgacttaccctgatccgattagcgttgatcaggaaaccttagtctttcggcgagggggtttcccaccccctttatcgttacttatacctacatttgcttttccacacgctccagcaaggctcacgccttaccttcgacgcagagtggaatgctcccctaccgatgatttctcatcccaaagcttcggtagaatacttatgcccgattattatccacgccaaactcctcgactagtgagctgttacgcactctttaaatgaatggctgcttccaagccaacatcctagctgtcttagcaatctgacttcgttagttcaacttagtattcatttcgggaccttagctgttggtccggattgttctcctttaggacatggaccttagcacccatgccctcactcctgacatagaactgacacgcattcggagtttgtcaagacttgataggcggtgaagccctcgcatcttatcagtcgctctacctcatgtcagtataagtcaaggctgcacctaaatgcatttcggggagtacgagctatctccaagtttgattagcctttcacccccaccctcaggtcatccagaagcttttcaacgcttattggttcggtcctccagatggtgttacccatccttcaacctgcccaagggtagatcacttggtttcgcgtctactccttccgactatacgccctgttcagactcgctttcgcttcggctgcggatctgagatccttaacctcgccggaaaaagtaactcgtaggttcattatgcaaaaggcacgccgtcacactaaaagtgctccgaccgcttgtaggcacatggtttcaggaactatttcactcttctgttcgaagtgcttttcacctttccttcacagtactggttcactatcggtctctcgggagtatttagccttaccggatggtcccggcagattcacgcagaattcctcgtgctccgcgctactcaggataccactaggcttcggttggcttcgcatacgcagctatcatgctctatggctgtactttccagaacattctgctcaccaactttcttgccacaacgtggtcctacaaccccacacatgccgtaacatggatggtttgggctgttccccgttcgctcgccactactgggggaatcattatttattttcttttcctgcaggtactaagatgtttcagttccctgcgttagcctcccgcattgcgggatgatatcccttcaggatatcgggttgtcccattcggaaatccgcggatcaaaggtcatttgcacctacccgcggcttatcgcagcttatcacgtccttcatcgcctccgagagccaaggcatccgccatgtgcccttacttactttttgtcttaccgatcacgtatggtcgatatatactttcagctttcaactttactttttttggtcacatcatgtcaaagatcgttgtcaaggattaaggattaaagataattcctaatcttgagaagtggagaataacggattcgaaccgttgaccccctgcgtgcaaagcaggtgctctagccagctgagctaatcccccttcaccattgatgaaagacccgctaaatcgtaaccggtcggtcaccaactgagaagtagtcccaggcagagttgaactgccgacctctacattatcagtgtagcgctctaaccaactgagctataggactgtcagtcaaaccctcgccttacggctcggcttctacttttctcgtatattttaataaacaagtacgcgcagtacaagaggttcttatggaagcataacttcaagaaccaacgatcgagtcgagacgtcactccagaaaggaggtgttccagccgcaccttccggtacggctaccttgttacgacttagccccaatcaccagttttaccctagggcgctcctcgcggttacgcacttcaggtacccccggctttcatggcttgacgggcggtgtgtacaaggcccgggaacgtattcaccgcgccgtggctgatgcgcgattactagcgaatccagcttcatggagtcgggttgcagactccaatccgaactgagagaggttttagggattagcatcacgtcgccgtgtagctgccttctgtaccccccattgtaacacgtgtgtagccccggacgtaagggccgtgctgatttgacgtcatccccaccttcctcacatcttacgacggcagtctcgacagagtccccagcataacctgatggtaactatcgataagggttgcgctcgttatggcacttaagccgacacctcacggcacgagctgacgacaaccatgcagcaccttcacaaatgccttgcggctgatctgtttccagaacattcatttgcaatttaagcccgggtaaggttcctcgcgtatcatcgaattaaaccacatgttcctccgcttgtgcgggcccccgtcaattcctttgagtttcaccgttgccggcgtactccccaggtggaatacttaacgctttcgcttggccgcttactgtatatcgcaaacagcgagtattcatcgtttactgtgtggactaccagggtatctaatcctgtttgatacccacactttcgagcatcagcgtcagttacagtccagcaagctgccttcgcaatcggagttcttcgtgatatctaagcatttcaccgctacaccacgaattccgcctgcctctactgtactcaagacacccagtatcaactgcaattttacggttgagccgcaaactttcacaactgacttaagcatccgcctacgctccctttaaacccaataaatccggataacgctcggatcctccgtattaccgcggctgctggcacggagttagccgatccttattcatacggtacatacaaaaaggcacacgtgcctaactttattcccgtataaaagaagtttacaacccatagggcagtcatccttcacgctacttggctggttcagactctcgtccattgaccaatattcctcactgctgcctcccgtaggagtttggaccgtgtctcagttccaatgtgggggaccttcctctcagaacccctatccatcgatggcttggtgggccgttaccccgccaacaacctaatggaacgcatccccatcaatgaccgaaattctttaatagctgaaagatgcctttcagatataccatcgggtattaatctttctttcgaaaggctatccccgagtcatcggcaggttggatacgtgttactcacccgtgcgccggtcgccagcaaagaaagcaagctttcttcctgatgcccctcgacttgcatgtgttaagcctgtagctagcgttcatcctgagccaggatcaaactcttcattgtaaaagtatcgtgactgcgcaaattaaaaaaaattaatgtgcgacagcttgttatctgttcaggacgctcgaattcaaaagtttatctttacctatataaaataagtattgacggttctcttgttttacccaaggcaattccccattgataaggaaaagccctgctcttgtactacttgtattgtttatgtaaatctgttcaaagatcgctcgtttcacgattgctattcttttcagaaagcggatgcaaaggtaagaacttttaagtatatcctccaaatattttcggaagttttttctttttttctgtattttcaaatcctttaaacaaggataagaaaagtaaaacaagaaaaattctttttctttgcgaatcggactgcaaagataaagagaattattaataagctccaaatatttttcgaaaaatatttttatctctctttatttctctgtgtcaccttccacacttctgtctcagtatttcaatcttaccactttccttctcttggaaagcgagtgcaaaggtataggatttaacaatacaagccaaacatatctatcattttcttttaataaaaatgaaacttttttgtaacttactgattcataaaagcatttcgcatgaacaattttgaagaaaggaaaaagagagaaaataactatacattatatatatacgtgcgcgagaaaagcacaaagaaagagaataaaaacattttataagcatgccggattgggtggtggcggttctgtcagtatagtcgccgcatcaaagcagggacattgtttcacccactcttccggctctatctccccgttatggttcaggtcggggctcaggtcgcggtgaccgcaaagccgggaaccgggataatccttcagcagcagcaacacaagcacacgcagggagtgcttttggaaaagggtgcgtgtatcggcagggcgaccgcactcgtcaagaccgccttcgtagcagacaccgatgctacctgcattccacccccggacatgggcaccaggcagggacaagggacgcagggacttgatgtcaccgttcttgcggatataaaaatgataacctgcgccggagaagccccggcgcaggtggtctgtcgtcaagtcgtgctccgtatagcagcggtcgcagcgggtggcggaacaatggacgacgataagattgatgaatctcatgagaattaaaaattagaaattaaaaattaaaagtgaaggaaacccgctacactgtcatggcatgggcgctcagggcaccaataagcgcggaggctacagcgattatcactttcagaatcttatcccaaacggatgattttgtactcataaaattaaggattaatggttaagaattaatggttaaggattagtgattaaggattaatggctaatgattaatggttaatcattagggattgattagcgataaacgatttgcttgtgttcattaacccttaatcactaaccattaatcattccttttttatcccagcggattttcgccctggtcgccgtcgtcgccggagccgcctccggaaccaccgccttgattgccgccgccggagccgccctcctcgggcttgtcgagcacaaagcccacattcgccgggctacgggtcacggcggtactgccgttcaccagcttcaactccttgtcggggataaagcggatattcaccttcgagatattgcgcaccgtacatttgtccgaggcctccatgccgggacagcggaacgtcatgtggaaagtgcccagctggttcagcttcaccttgtcgccgttggcaaggttgccttgaatctcctccaccagggcttcgatgacgtgcttcacgtcgcccttcgtcatggcacagtttttctgaatggaggcggcaaggacatcgatgtccacggtgccgcaggtcttgggtttctgacggagatagtacaacatgggcgaagccgggttgcttacgattttacggcgctggaagcgctctacaattacatccataaatttgaaaagttaaggtttaagttaagaaaaatgagttataagagagaagtgggtaagggaagggatagggcgcccgaatcaatgattattccttttcttaagcacattacaaagatacaacattaagaagcggaagtcaagtgttttgccattttttttactacaaaaaacacggagacacagagtttttcaagcaataagaaaaatctccgtgtctttgtgtctctgcattctataaatttccatccatcactttgcattcctcgtcagccactccaatggtggtatgtagtccaccagttttgtcatgctttggttatggtggaaatagacttcaccggttttgccattacggtgcttggctatgatgacgatgcccaagccatcggtgggataagtactcttcttatcgacggtcttgccgtagagggcagggcggcaaagcagcattaccatatccgcatcctgctctatggcgccgctctcgcgcaggttgctcagggtggggcgatggtctatggtaccgtcgctcgcccggttcagctggctcagcagcagtacggggatatccagctccttggccagcagctttgccttgcggcttgcctgcgccacttcctgctcgcggttacggtttttctggtcactcctcatgtcacatagttgcagatagtccacaatcaccatgtcacagcgattcttgctcttcagcagacgggcggaagaacgcacgcggtccatgctcgtcatcggatggtcgtctatcagtatgggcaaccgcgacaactcggcagatgcctcatgcacctgcctcacctcgccgggggtgagctggccgctacgcaggtgttgcgggtctaccccctccgtagctgcaagcagccagcggtcgcccaggcgctcgccttgcatttcgaggctgaagaccaccacatgacgccccgccatggcagcggcacgggccaggtggagggcaaaggccgtcttccccaccgacggacgggcagcaaggatgttcaagtcgccgcgctgccagcccgccgtaacgtggtccagagcgtcaaaacccgtagggatacccgtaatgccgttgcatccgtgctccatacgctgctccacctcggccagcgtgtcgtccatcagccggtctatggagcgaaggtggtcggctacgccgctctcgtcctccagcccctccagcagtcgatgggcttccaccaggatgtcgtcaatatccatcgactcgtcggcactgaacgccagcagttgctggaatcccgtacgcatgatacgccgcgtgtgcaattgcctaaggatgagcgcatgatactccagatgagcactggagctgaccttcgagctgatgcgtaacagttcgtaaggcccgcccacggcatcgagtttgccacgggctgccagttcgttcttcaacgtgatggtgtctatggacttcgcgctgcgatacatcgattgcagggcggcaaaaatttccagattcttctcctcgtagaacatctcgggacgcagtttgtccgccaccagaggcatggcagcgcgctctatcatgcaggcaccgatgacagcttcttcgaggtcactgtcgtgggaaaaagtagtttcagtcatcatattcattttcaaaagatttgtccgccagataggtggcggcttgtttacaatatttttggttgttcagatggtcgtaatattcgtcgatgttgtccagtgcccgctgtttctcgcctgccgtcaattttttccattcgcgacgggcccggccgatgtttaccttgggatgctcggtgatgtcatgaaacttttcccagaagatgcagaagtcctctcccgccccagccaccggcgctgccttcttcttccgcggggctgctttaggacgggcattgccggtaaggaaatcataatcggggatacggatgtgcatcacgtaggggttggccacccgctccacgataccggcgtcgaacatcttgttgaagaagtagcgcgtacggttgcggggccaccccaatatctccatccagcgggccagggaaagtacggactcgccacgtacacagtcgaaaaggtgtcccctgacgttgcaggtcaccgtgctgtagttgacgtgtgtcagcacaaagacaaaggcttcgaaggcatcggcggctttctctccggttttcatattcatttgttcctcaaacaaggctttggggaagaggagatagcctttcttcagcatctccgttgtcatgggtctcatttctttttccatttttgtctattcttaattcgataatgcgacaaaggtaagggaccagccagggggatacaaataagcagttagaatcggctaaaaattaatgaaatacataaggtggcgagagagggtttcacctcatcctccaccaccctatataataatatactaaaataatcagaatgtattagaaatacattctctatttcgcatattttttagagaccagaagatacggatttttcacggtcatatccttcacgtggtcgggcatcccccagtagctcaggaggatgcctatctgtacgggggtgaggtgggcagtcctggcggtatagccctggtccgtcaggtccttcagcaggcaagcgtgttccgcaatggaacggcgcagggcctttacggccgagcaggcatacgcgtagtttgggtaataggccactgctacatctgcaatgcgatggcatccctcgagcagccattcaaaactttgttcttttatcattttgcatatatttattaataaaacatgttgcaaagttagaatgggagggaaaactgggaaagttcgagtggcaataagaaaacttgctcaagaaaaatgaatgtgtcaaaacggttgatgacacaccctcactgtcttattgataaaagcaacactttcatactatagtagtgaagcacacattttgtgtatttcatgcaacttatcggtcagcgattttttttaagagagacagccatattatatctcgcctgcctattaacgaggagttccgcactaatccctaaggctgcttctaccataagagcgaagtcactggttacatctccctctccctcttgaagtaccccagcaccgtggccggtgtaagacagcagcgttccacgcttttcaggcggctctgaaaagtatatcgggagcatagcacaaggcagaaccaagtatagttcaagctacggtgcaagcggtgctgaaggtggtcgaaaaaacgggaaacacgggcaaagaagctagcgatacgctcgcgggggacaaaacgggaaggctgtgcggcagcattgcgggagcgcttggcggtacgttccatctgtgcaagggtatactccagttgctcgatgtcattgcgggtgttctccatggtttgttccaatttctcgcgtcgtgcctgctgcttggcatatcgttcttttctgtcagcgattcgatttttgaggtcttctgcggtgaggtttattcctttgttctgaattgatttcattataaacgtctgttttatagttgtttgtctgtatataagttcacgaaaacacatcatccgtctgcaccgaatgcataatgcataaagggcaaacggatgatatatcaggagcaaatgtacgatgaatattgcagataaagttcttaatgaccattaagtcttgttataaaacatgatattatctactgcaaatttggagattatcagaaaacacgtacctttgcaatgtgtttttcatagtattagatttaaggttaacaaaagattggctgtctgggatagatagcctttttttatgcccataccattcaattcatccaattagcctcaatttcactttatacaaccttccaacccacactaaagtattcttaagtccaatttgcgcgtttttttcatgcatgaccattaccgttatgaaattattttttctacatttgcatctgctaaaaggaaacaaaaccgcatcaggcagaaaaaacatgaggaatacatcacccgccgcacctaccatccgcttccgccgctggagcagaaaagcctacgctgcatttgccagcatagggcggtgtgtcaccatcggttgcctgcgcaaaaacgtggcagacagttctctctccaaacagaaagctgctggaactgccggacatgccggatgcagggaagagagtgcctggaggggtaaaacggaaggaaggaaaagcgacatcggcattccgctgggtagcagcagcgccctgacaagtatcctcacggagcttggaacgaaccgacacattctttttgaaacacaagtcatccgcccctgtggaaatacgggcggacaagacacacatagcctgaaacaaaagagaataagaggtacggattactggaagccatgcagcagaatgacgagctgcaccgccccggcaatccgtacctctgtctttatccatgaacataacccaagaaagatatgaccctacagaaattaaaggaacaagtgctgcgcggcagccacatcagtaaggaagaagccgaatggctggctgtgcaaccagacaaggaagcgctatacgaagctgcccacgagataacccgggcccgagcctcggaggagttcgacatgtgctccatcattaatgccaagtccggacgatgcccggaaaactgcaagtggtgtgcacagtcgtcgcactacaaaacccaggcagacgtgtacgacctggtgaataaagaagaatgcctgcggcatgccctgcataatgaagcccagggcgtggcacgtttctcgctggtgaccagtggacggaagccctcctccaaaaacatggagaaactgtgcgaagccgcccggcacatgcgccggcactcgtccatccagttgtgcgcatcactgggactgctcaacgaagacgaaatgcgggcactgcacgacgcaggcatcacccgctatcactgcaacctggagacagccccctcctactttccccaactgtgcagcacgcacacgcaggaagagaagctgcgtaccctgcaagccgcccgcaacgtaggcatggacatctgcagcggcggcatcatcggcatgggcgagagcatggagcaacgcatcgaattcgccttcacactgcgcgagctggaagtgcaatccatccccatcaacctcctgagccccattcccggcacaccgctggaacggcaggcaccactcagcgaggaggaaatactgaccaccatcgccctcttccgcttcatcaacccgacggctttcctccgctttgccggaggacgctcgcaactgagcaaggaggccgtgaagcaagcgctgcacatcggcatcaactccgccatcgtgggcgacctgctgacaacgctcggttcgaaagtgtcggaagacaaggtgctgataaaagatgcaggataccggttctgcggctcgcagttcgacagagagcacctatggcacccctatacctccacaaccaacccgctgccggtgtacaaggtgaagcatgccgaaggcgccaccatcaccctggaaagcggagaaacgctcgtagagggaatgtcgtcgtggtggtgtgccgtccacgggtacaaccaccctacactgaaccgggcggcagaggaacagctgggcaagatgtcgcatgtgatgttcggaggactgacacacgaccctgccattgaactgggccagttgctgctgccgcttgtcccaccgtccatgcagaagatattctatgccgactcgggctcggtggcagtggaggtggccttgaaaatggccgtgcagtactggtatggcaagggaaaggcgaagaagaataattttgtgactatccgttcgggctatcacggggatacatggaatgccatgtctgtgtgcgacccggtgacgggcatgcattcgctgttcggggcatcattgccggtgcgctatttcgtgccgcagccgcgctcgcgcttccacggcgaatgggatgaacgggatgcggcggaactgcggaaactggtagaggagcatcacgaggaactggcggcgcttatcctcgaacctgtggtgcagggcgctggcggcatgtggttctaccacccccagtacctgcgcgaagcggcacagatatgcaaggaacatggcctgctgctgatattcgatgagatagctacgggcttcggacggacgggaaaactctttgcctgggagcacgcaggtgtggaaccggacatcatgtgtataggaaaggctataacgggtggatacatgacgctgtctgccgtactgacgacgaatgaagtggcggataccatctccaaccatacgccggaggtgtttatgcacggacccacctttatggggaatccactggcctgcgccgtggcgtgcgcttcggtgaagctgctgacctcgcccgaatacgactggcaaggcaaggtaacccgcatcagccggcaactgctggaagagcttgaaccggcacgccgattgccgcaagtggcggatgtacgtgtgctgggagccatcggagtgattgagacaaaagaacccgtagacatggcgtggatgcaaaaacgcttcgttgaagagggaatctgggtacgcccgttcggaagattggtatacctgatgcctccgttcattatagagccgggacagttgaggaaactgacgggaggagtgataaagattataaaggagatgaactgagttttgaatatgccaattagcgcgtgaaaaaatttatgaatataaccgaatatatgcagcaagagctgcaaacactgaaagaacacagcaatctgcgccgcctgccgcaactgacgcacgaagggcgcacggttgtagccgatggccggcgtatgctgaacctttcgtccaacgactacctgggcctggctgccgaccgccagctgagggaagaattcctgcagacactgacaccggacaccttcctgccgacttcctcctcctcccgcctgctgacggggaacttcgggatttacgaagagctggagacggaactcgccacacttttcggcacagagacagcactggtgctcaatagcggctatcatgccaatatggggattctgcctgccgtgagcgatacacaaaccctgatactggcagacaagctggtgcatgccagcatcatcgacggcatccgcctctccaccgcacgcagcatccgtttccgccacaacgacctgctgcaactggaacgcctgctggaacaacaccatgcagcataccggcaactgattatcgtcacagaaagtatcttcagcatggacggtgaccaagccgacctcaaggcattggtgcgtttgaaaaaaagatactccaacgtactgctctatgtggacgaagcccatgcattcggcgtaaggggaccgcgcggcctgggctgcgccgaagaaaccggatgcatccgggatatagatttcctcgtgggtaccttcggcaaggcagcggcgtctgccggcgcatacatcgcctgctgccggacgatacgcgagtatctcgtcaaccggatgcgaaccctcatcttcaccacggcattgcctccgacaagtattgcctggacactgtttatcgtgcggaaacttgccggaatgcagaaccgccgcgagcatctggctagaatcggccggacgctgcgcgaagcattacaagccaaagggtacggatgccccagcgcaagccatatcgtccctctgattatcggccccagtgccgacactgtgctgtgcgcagagttgctgcagaggcatgggttctatgcactgccggtacgcccgcccacggtgcccgaaggaacatcacgcatccgcttctcattgacagcggacatacgggaagatgagattggagaactgattccccttattcccctaaaggaagagaagaatactaacgctatacgattctaaaaacagatgaaacaaagttacattatacacgaacatcatccccggctattgctgttctttgccggctggggagccgatgagactcctttcaaaatgtatcgtccggcagccagcgacttcatggtgtgctatgactaccgcacactggattttgacgcctccggactggaaaaataccgcgaaatcaacctcatcggctggtctatgggggtatgggcggcttcgcagaccatgccacagctctcatcgccaggtacgtccggcgaaggtatccatatggcaaacagcatcgccatcaacggaacaccctaccccatagaccagcatatgggtattccacccgccatctaccacgggacattggacggactgaccggggcttcactgcacaaattcctccgccgcatgtgcgccaacggagcagccttcaaagctttcctggaaatcactccccgccgtccgctggaagagttgagagatgagttgacggagattgagaagatgtaccacacactgcctgctgccaccttccactggcagcaggcagtaacgggaggcaacgaccgcatcattccgccagccaaccagctgcaagcctgggaaacactcggcacccccgtgctgcaaacggaggatgcccactatcaggaagagttattcagacattacctgcaagacctatggacaagccactgaacccgatggacaaacaactgatagcctcccgctttgccaaagcccggaatacctatacccgggaggcccgcgtgcagcaacaagtcgccgagaagatgatgcagctcataaaggaaccatacacacgtttccaccgtgtcgtagagtttggctgcggaacgggaagctactcgcgtatcctcctccacaccttgcaaccggaaaccctgctgctgaacgacttgtgccgggaaatggaagagtgcgtcaaggaactttgcgacggcactaccgtgcagttcgtccccggtgatgccgaagccatcgacttccccggagaaaccgacctgataacctcgtgctccaccctacaatggttcaacgacccaggtgctttcttcacccgctgccaccaagcactggtggcagacggcctgcttgccttcagcaccttcggcgccacaaacatgcacgaaatacgccaactgactgggcacgggctggactatccctccattaaggagctgcaagccctgctgtctcccggcttcgatattctccatgccgaagaagaggtgatatccctgcccttccccactccccaggcagtgctgaagcatctgaagcaaaccggagtcacgggtacggaaaaaaggatgtggacgcgtggccgcctgcaatccttctgcgaagaatacacaacccggttcagtgatgccgcaggcaacgtaagcctaacctatcaccctatttatatcatcgcacgaaaaaagacaaaataatggaaacaaaaaacatctacttcatcagcggcattgatacagatgccggaaaaagctattgcaccgcctggtatgcccgtgagcttatgcaacgcggcctgcgcgtcatcacccaaaagttcatccagaccggcaacaccggccattccgaggacatcgacctgcaccgccacctcaccggaaccggctacctgccggaagacaaagaggggctgaccatgcccgagatattctcctacccctgctccccccacctcgccgcccgcatagacaagcgcccgatagacttcgtgaaaatagagcgtgccaccagggaactttcccaccgctatgataccgtgctcgtagaaggagccggaggtctgatggttcccctcaccgaagatttcctgacgatagactacattgtggaaaagcagtacccgcttatcttcgtcacctccggaaagctgggtagcatcaaccacaccctgctgagcttcgaagccatcaagaaccggggcatcgcactcgatacggtactctacaacctctatcccaccgtggaggataagactatccaggaagacacgatgaaatacatcaagcagtatttgtccaagcactttcccggaacaaagtttgaggcagtgccggaaattgcgtaaatttgcagcacataaacgtcctactgcacatggaagcatttacattagattcaactgaaattatcgtactcgccgtagcgggtggtctgttccttattcaaattatctactacctctgtctctacaaccgtattcatgcacgccgccgtgccgtgaagcagggaaacatgcacttcacccaggaactgccccccatatccgtcatcatctgcgcccgcgaggaatccgaaaatctgcgccgcaacctgggcgccgtgctggagcaggactatcccctatttgaagtcatcgtcattaacgacggcaacactgatgagagcgaagattacctgaccatcctcgaggagaaatacccccatctctaccacagcttcgtgcccgattcctcccgctacatcagccgtaagaagctggctgtgacgcttggaatcaaggccagcaaatatgaatggctggtgtttaccaatgccaactgcatgccccaaagcaaccaatggctgcgactgatggcacgcaacttcacatcacgtacccaagtggtgctaggatacagcggctacgaacgcggcaaaggctggctgcacaaacgggtggcattcgacaatctgttcacttccatgcgctatctgggatttgccctggcaggcagcccctacatgggcatcgggcgtaacctggcctaccggaaggaactcttctaccaacagaaaggattctccgcacacctcaacctgcaacggggagacgacgatttgttcatcaaccacgtggctaccccggagaacacgcgggtagaaacggatgccaatgccattgtacgcatgcaaccgcttctgcgtgccaaggactggaaagaagagaaaataggttacgcctccacagcacggctgtatcatgggatgcaacgctggctggccggttttgagaccctgactcgcctggtattccacgcatcctggatagcagcgatgttcatcggcattatgcacttccactggctggcagcaggcgtcgcttgtcttttgttcctgttccgtttcaccctgcaggccgtcattgtcaacaagactgcccgcgacctggaagaacaacgtagatattacttcacactaccggctttcgacctattgcagccgatacagtctttacgttggaaatggtactgtctgttccgcaagaaaagcgattttctgagaaagtgattctcttattcgtaacggatggaagttgccggatggatgcgtgtaatcagaaatgaagggcccaacaacatcaggactgaagccagcaatgtaccggcattcagtagcaggaacagccagatattgaaagataccggaacagtagccatataataggtctcagggtcgagcttgaacaagccggaccagcgctgcacaaaatagaatgcaaggccgattatgttcccccagagcatgcctttcccgatgaggaagaccgaaaaccaaaggaaaactttacgaatagtaaagttgttggctcccaaagacttcagcacacctatcatggaggtacgctctatgatgataatcagcaggccggataccatggtgaaccccgccactccaatcatcagaatgagaatgacccagatgttgacatccaagatgcccagccaggcaaagatttgaggattgagctgctctacattgcggacgcaatactcggcgccataacggtcgggattcccgtccgtatcggcagctacctcataggtggtttcttccagcttgtcataatcgcgtatttccagctccacgccactcacctggtctggctcccagttgttcaggcgattcaccaggtagaggtcggtaagcaggaataggttgtcgtattcagagaagttggtttggtagatacctgcaatcttcaggcggcgggcacgcacatcgtcctggatgaagtaggtgtctatcttgtcaccgagtttcaattgcagcttgttggcaagagactttgagatgactacgcggttggacgaagcagaatcgctgaattgcggaaactccccctccagcaaatggcggtggaagaaggtgctatcatactcctgccccacacctttcagcaccattccctgaaaggcatcggcggtctttatcatccccggcttggtggagtagcgttgtacatgcttcacttcgggataatcggaaagcgcagccatcatgctgtcacccaccaccaccggacgcgtctcgtatgagcgtgcagcatccaggttgcctatctggatatgggcaccgaaacccacgattttatcccttacctcgctcttgaagccgacaatgacggacacggcaataatcatcaccgccagtccaagggcaatgcccaccatggcaataaggacagccggacgggaaacttgcttgcccggctccgagttgcgataaatgcgcaacgctataaagcgagatagattcatgggccattattttttaggcgcagattacacggaagatttgaaacaaacgtctttatcttaagttttccgtgtaatccgcgcctaatgaattatttcattttattcggttcgccccggataggcttccaatgctttttgcaggataaacaaggcgcggttcaagtcatctttcttcagtacgtatgcgatacgcacttcgttgcgaccagaacccggcgtagtatagaagccggacgcaggcgccatgaataccgtctgtccctcgtattcaaactccgacaggcaccaggcacagaacttgtccgaatcatctaccggcagctttgccaccgtatagaacgctcccatcggaatgggcgaatatacgcccggtatgcggttcaatccgtcaatcaggcatttacggcgttctacatattcatcgtatgtgtcgcgcagataatcctcatcagcatccaacgatgcttctgcggcgatctggccaatcaatggaggactgagacgcgcctggcagaacttcatgacagcatcccggatttccttgttcttcgttatcagggcaccgatgcggataccgcactccgaatagcgcttggacacggaatcaatcagcaccacattgttctcaatgccttccagatggcaggcagagatatagggagaacccgtataaataaattcacggtacacctcgtccgagaagaggaacaaatcgtacttcttcacaaggtcgcgaatctggttcatttcacggcgtgtatagaggtaacccgtaggattgttgggattgcaaatcaaaatggcccgcgtgcgctcgttaatcagctcttcaaacttctctaccttgggcaacgagaaaccctcttcgatggtcgtggcaatggtgcgtatcttagctccggcagagatggcaaacgccatataattagcataggccggctcgggaacaatgatttcatcacccggattgaggcaagccaggaaagaaaacaagaccgcctccgagccgccggaagtgatgatgatgtcgtctgcagtcagattgatattgtacttcgcatagtaacccaccaacttctcgcggtaactgcgataccccgcactggaactgtattccagaactttccggtcgatgttccgtatcgcttcaatcgcgacttccggagtaggcaggtcgggttgtccgatgttcaggtggaatacatgtatgcccctctgcttggcagcatctgccaaaggagccagttttctgataggagatgcgggcatctccattccgcgaatagatattgttggcatgaggttatttactatttgacaatttacaatttactatttaatagactatttataagtgatattgctatcactttatcattaaagttgcaaatgtagcgaattatttgaaaccaaaaggaaggcaagaccataaaaactttaaaaaacttatctatcgtaaaaactctatgatatgtaaacggaaacttgtatctttgaaaaagcaaacgaaccaagctggctcaattgtaaatagtaaatagtcaaattgtaaataacaccatggtcatcaaccttataacttttgcttccatactgcataaacaagcatcagtccgtagctcccacgaagtgatattgactgaattggaaaaatactttaccgtcaacttcattgattacaaagatatagacaagttatcacccgatgacttcagtattatattcattgccaccggaggtgtggaacggctggtaatccagcatttcgaatcccttccccgccccgccatcctcctggcagacggcatgcagaactcactggccgccgctctcgaaatatcttcctggctgcgcggccggggaatgaaaagcgagattcttcacggagagctccccgaaaccatcaagcgtatttttgtcctgcacagcaatttcatggcacaacgcagccttttcggcatgcgcatcggcgtaatgggcactccgtccagttggctcattgccagcaatgtggattatctgcttgccaaacgccgctggggtatcgagtacacagacgtctcattggaccgcatttatgaatactacggacagataacggacgacgaggtgggcgaagcatgcgccggactggcaggaaaagcgcttgcctgccgagaggcaagccccgaagacatgataaaggccatgcggctgtatcgagccatcaagaggattgtagaggaagagcgactgagcgccattaccctcagctgcttccgtctgatagaccaaacgggaaccaccggctgccttgcccttgccttgctgaacgacgaaggaatcattgccggatgtgaaggcgatttgcaatccgtcttcaccatgctggccgtaaaagtgctgacagggaagaactctttcatggccaatccttccatgataaatgcccgtaccaatgaaatcatattggcacattgtaccatcggtatcgcacaaacggagcagttcatcatacgcaaccattttgagacggaaatcggcatcggtattcagggaatcctgccgacaggagatgtaaccatcgtgaaatgcgggaacgaaagtctggacgaatattacctgagcaccggcacgcttgttgagaatacaaactacatcaatatgtgccgcacccaagtacggataaaaatgaactcccctgccgactatttcctcaagacaccgctgggcaaccaccacatcatgttgtacggcaattacgaggatatattggaggagtttctgcaagccaatgcctgcaaacggattgaatgattattcgttcgcatccggtatcaccacctcgaaacgcgttccttttcccaactctgaggagaccgagatagaaccatgcaagcggtctacgatggtctggcaaatgctcagccccaaaccggcaccctgcgtaaagctgtcttctttgtagaagcgttcgaagatatgtttctgggcgtcttcggagataccgcttcccgtgtcttcgacaaagatggtggtatatccttcccggttcgtgacgtagccgaaggtaatgctgcccgttaccgtgaatttcttggcattgtttatcaggttgttcacgacctgcttcaagcggacggaatcggtgatgaccaatttgtcttccccttccggaatctttatacgtagctctacatcccgaggcatactcagacgctgggattcatggacttcctgcatgatgaacgccagattgaatgctccgaacttaaagtccatcgtgcccgattctatgcgcgagaggtccagaatatcgtttatcaacgccaacagcaatgtacagttgatgttgattgtttcgacgaactgctttacctcttccggagaaaaagcgtccaagtccttcaacaaatccgagaagccgacaatggcattcaaaggggtgcgtatctcatggctcatattggcaagaaacgcagatttgagcttgtcggcctgcaaggcacggtcacgtgcggcaatcaaggcctcttccgtatccttgtaacgctggatgctctggcatactcccaataccatgtatggggtatcaaccgtcagtccgtcataagcggtactgcggaactcccaccattcatagctcccatccgcactcttcaaccggaaactcatccgtgaattgatttcattgcccaacagaatggcatcaaaattcctgcgcgtatgcagcaagtcttccggatgtataagggtgtccatctcatcacgtgccagcaagtccgtatcaccggtatacccgaaacggcgcagcaatccacccgggaaatggaaacggttcatatgcatgttgtactgccacggataaatggagctttcctccaccgccatattgaagaagcgtctctgcatctcttcttcggagatattgcggcatacaatcgccattcccgtcatcttttcattggcaaagataggtactacctcgccggaaacggggaaatacgttccctgatggttttcctgcatgaaggctttctccggaatagaaataggtctctttccggtacgtactttcttcaacaagtcctgcaagatgttttctccattcatgtaaatcctgaaaatggagccggccatctgcccttcatagaaacgggacgtataggtttcggaagaaagtcccagcatctgtaacaacggacggttgacaaaatggatgcgcaggtcggtatcatacgtaatcaagccgtcgcgaatggaacagaagatattgtcgaactcgtcgcgctgctccaccaggcggtgctgtatcaacaagcgggtctgggcatgtatgcgcttacgcgactccctgcggttggcacggaaaagccaggcaaccagcagcaccaatgccccgacaatcagcgaatagaacagaatgaaccagacacggtaacgctccatcaacggtatattcaaaatgatgcccttgctctccgcacggttcgtgtccacacggaaaaactgcaactgtttgtaatcgaacagcaacttgcccccaaagtcctttactcccaatgaggcgggtgacttgcccttcaaaatacttgcagcctgccggccggcagcaaaggcatcctctccgggaacggcatcatacacacacagcacaccgttcgtcatagccaggttctggctggtaaacacgggagccttcaacttcaaggaaagaaaaggaatccatttgggagctataacaatatgcttgtaggcattgtagtcatagcaaatggaagtgatgatagagttcaaggacttggcctgcacgttcagcactttcaactcatgctccggatagttgctttttatgcgttcccaagagtcttccacagccctgacccctttaaggctcaggaaactgctgtcggacagacaaaccaactccctgcgggaagggaacatacggacagccgcatccagcaagacatcgaaatccgttttcgaaacatagccagagacgttgggcattctttcaaagaccctctcatccgggtatttgatgcccgaaaccaccaccggtatctgataaggcagggaatcaccgcaatgggtcaatgtgaagaaagcctcatcgctggaagtcacaatcaagtccgttttccgttgcctggcacgctggcaaatgcggcgcatgatgaaacattcggaagcgaaagaccagtaatcggcattcagatattcggtaatgatattggctctaactcccccctttttcagtccgttctccagattttctgtcaggaggctgtgccaaggagtattttttgtataagactgtatgaaaagtacattgtacgtacgttccgcagccgaaagtgttcccgacatcaaccacaacaagcctgcaagcaatggaaagaaaaggcgtttcatcataatatagattttgtatactcaacgcaaaaactcttattcgtcacgcaaatatacaagttatattgagaatgagtacagattactcaaaaaaaactcattcatcatgcaatgcttcggcaggctgcacctccatggcccgtgaagccggataccagattcctgcaatcaccattagtgccatcaatacccagacaatagaaacgcatatgacaaatctcccccaagtggcatccgtggcttctgtaaaagtgacatctgccataaccatgttaatacatattatcaaagccgggatagaagcaagcgccaacagcagcaacccttcacccagcaattgccaacgtatccttccacgactgctgcccatggccatgcgcaaggcaatctcgctgcgacgatggcgggtacggaaccagaaagttcccatcagcccaatgaatacattgaaaacgaagaatatcacaatgagccttgcactacggatatatggggtgattccttcggcagcatcccgttctatcttctggtccttatagctctgtatgtcgaaaagatagaatggagcgacctgcagctgcgacgtcatatcctgatagaaacaggctgcaaaattatccgtatctgcctccggacgtatccgtagggagatgaacggaaggtactgggcctcatagaaccaaccagggaaaggagtcagaacaaaaggtccgtaacgggcgtaatcatccgtcttctgcaaggcacagactgcagagacacggtaacggagacctccgctgtaataatccaggaactcgcggcccaccgccccagtacttgtctgaaaaaggctgtctgccagatcacaggtcaccacggcaggcaaaggactagcagtggaattccagtctacgacattcccctgcaacaacggaatgcgcatgacgtcgaaatattctggagacacatagcgtactgtagtctcgacaacatgtacgctgtccgtcgtatacccctggtaaacacgcccgcgggtataggtatcggtacccaaccacatggccgcactctccacagcaggatattgcctgatacgccggagcacctcctccatcggtttgaaccagaaggtctgcagactgtcttccgacgtgcacggtactatctgtgtggggttgcaggaaatccttatcttatagacatgctccaaatcataccccttaggctgccgttctgcatgggtaaagccatagagcacatccacacaataccacatcaatgtaaatacaatcaacagctcggcaaacagccagccattactgcggcgctggttccatatctgatgtaaaatagaatgtatcatactcgttactgtttttttaattgggattcgtttatccgttcattctccaccaagaacctcggctatgggacggcgggtggcatgccaggccggaataaacacagaaagcaggttgaacaacaggcacaccaccaatacagccacgaaaaccgtgggacggaagaaaagccagacacttacatcaaaattcgttccgggagcgccatagccaagcatccaatccttacccagccataggaatatgcatgaaaagagaaaaccgagcaatgcgccggcaaatgccaaagccagattctcacggagcaactgcaccattaaagtagaacggctggcaccgtatgctttccttaccgcaagctcagccatgcgacgggacatttgcgaagatataagtccgctgacattgatagcaggtacaatcagtaatatcagacccagaattatgcaggttacggcagggctcatcgtatcattacggaagaactgccgttccgtataagtgctgagatcgggaagttccagtttatactcagtcagtgtctcgttgaagcgggcaagcgactgttctatctgccgcttgagctcctctctaccgacaccgggcctgacaagggccacagcctcgaaatctccccgtagcccttcactgcccaaatcggaattccgggtggaataaggcatccacaactctccataggcaaatgtgaacagagagctcacatctttggtgacccccacaatgcgtttagggcgaaagttaacaaaataattcttgccaatggctgcttcggcagacccgaaagcttcgcgggcaagctgttcacctataaccacaacatcccggcaagcatcgaactcttcggtactgaaaagacgacctgccacaagagggatgtcgtagacacgccaatagttcaaatccacctgacgaaccgtgcggcgcattccccgcgctggcgactccccacagtatctaagataggtaggtcccagataggtgacaagttctgctcccagaagttccttaaaaatagcgttgacagcccgataagacatacccgtattggaattgctgcggtcggacttacggtaagaatatccataagaagaatataccatactactgcggtgcgactcaggagccaagtcagccgtctggatgtcatacaccatgtaaatgaccatgacaaaggtgatgctcactgccgtaccgatgacggaaacagcactgaaaaagggattctggcggataagagctaaaatttgtttcataactttctattcatcatgtaatgcttcggcaggctgcaccttcatggcacctcttgccggataccaaatacctgcaacaatcatgacagccataagcgaccaggttgccacaacagctgccagaaaacgccctccgccgaaaggaagtttctcaacatccaccaactccgccattcccacattgaaggcaataatgacggcaggaacggctgcaagggtaagcagcaatataccctccgacatcagacggaggaagacaccttgacgcgaacttcccatagccatacggagtgccacttcacggcgacgctgctgtgtacggaaccagaaagtgccgataacgcccagaaaaatattcatcaacagaaagccgagcacacaaagctgggttttggcttcattcatgtcctcacgttcgcatatctcgcgcaaatccttgaaagaagttacatcgagcagatagagattccctacttgatagaggcggtcagcatcctccataagcttctccataaagccggaatcggcatcaggacggacacgaagactgagagtgatgtatcgtggatttccatattctttcagtctgtcaaggttaagatgcaaagctgcataagtacctccccactctgaagaagtatagaagtgcgaccaacgtacgggtgtgccgacagcccctacgcggcaccgttcatcactaccgaaattcaacagtgtaagttcacggtcttgtaaagaagctgcattgttcaggtgcaattcaggataggctgcaaaaagattggaagaaacgaccatatggtcatcccgtatggcagcggccatgtgggtcaacatctcctcatccgagctaccataacggaacacacggaaaaaatcaggttccacccaaagcagatgaacattctccgatatagtatccagccccagattgagaccgttgctaccgtcattataaggaaagcaattctgagaaagtgccacagcttccacacctggacgatgcctcaaacgttcggcaagttccacaagatgccgcatatcatcgtccttggtcaaatcgaaattataagcagtagacttgagagtaagcttactgactgcaatattatagcaatgttccgtatcaaaacccatcggggcattgtaaacacgaagagtaaccagtgtccagtccacaatgtaccaaagcaccacaaagaccagcagcagttccgtaaaaaggaaaaggctggaacgccattcattcttaatctgaaccaatatattcttcatatgtcattctcccctctgattgattgcatccactatattcatcctcgaagccctccatgccgggataccggctgaaagcaaattcatcagcaaacagaaaccgaaagccgacagaaaagcccatggagaaagtaacatgccaggtgtcagtgaagtgtctccatttaaataggcattggcgctattgccaaagaggaagccgttcaataaaaaagtagcaccgtaactcaaagccagccccagcatacccgccaacagagagagcagcaggttttcgaaaaacacctgtcttaccagttcactacccgtagcgccgaaagctttgcgtaccccgatttcactcatacgcttccgcatccgcgagagggtcatggaagaaaggttgatggcaggcaccagtagcaagatggtgatgacaagcgcgtaacgcaaaacaatccccttcatatccggcaaatggtcccatttacgatacagattggcaaacaccccatcgggttggtcacgataaaaggtttccgcttcggatagaccggcgttatacgcaaggcgcaatctctccgcctcttcacgaatagccggaaaatcggccgacgaatgtgctaatatcacagccttcatctgccccatcgtattttcccaccaggcaaaaccagcagcatcggtcgaattataaggtacccacacttgcccgtatgctgaagtggcaagcatggaaacatcggccacgacacctgaaacccggtaatccacatgattcagttgcaatgtctgccccgttacctccgtagtgccgaacaaccgacgcgccacggtagccgagataacggcacaaggtattccggcatcgctgtctgccttgctgaaacctttaccactcaaaaaacggaaacggaagatgtgccagaactgttcgtccgtctgcaccatatccgctgtcagctttgctccagcgagcaacgacacacgcactttttccggtaaagatataagcgtgacggcctctgccgtagaaagctgtttaaaacatcccttacccgtctgtacagacatgtgcccatatgccccatggtcagttcctttataccttactgccatggtagaaacataaagcgaacgcgagcggtttatctccggctcacaatctaccatacgtacttgcagggtgatgacaagcaccataatcatgcaaatggcaagagcggtacctatcacggacacccaagtgataatgggattctcccgcaaatggtagaaggcttgctgaaagtagagacgtatcataaataattaaaaattgaaaattaaattattcgtcgtgcagagcttcggcgggctgtaccttcatcgccttgcgggcggggatgccgatgccgataataatcatgagggctatcaacacaaagctgatcgcggcacagagcagcagacggccccactccaatgtcgtaccgttcctccaggagttcaattccagattcgccagattatagtcgatgagcaatgcaacaggagtgacaattgccaacaataatatcccttcactaagcagccggatgaagatggcacggtctgtcgctccatgcgctttgtgcagcgctatttccgaacggcgttgctgcgtacggaaccagaatgttccgagcaagccgaggaagatgttcagcagcaggaatcccatacccatcacatagttacggatatcattggtccatgcctgctggaagttgcggcggatgtccttgaaagaacgtatctccgaaatgaagatgttacctacgcgaaactggctctcactgtctgccttcaacctctcaatgaagtcattgtcctgcccttcacggacacggacacaaagttcgagaccgacatagtagaaattctgcttcaccatcatggaatatgagcttcgtgcctggtcgtaatcgtgatagcgtacatcttgcaatgcggcacccagccggtaggtcttcgttgtgtccccaaagagatggaaccgctggcccacaaagtcggtcatcctacggtcatacttactaaaaaggttgtccgaagccatgaaatccccgcgttccaacatttcagccaattgttcgggtgtctcgccacgcgtgccccgatagcgaaatacacggggaaaatccggtgtcaccaacctccggatagtccaaccgggagaacgcaacgtatcgtagctcacttcagcgcttgaattgcttccattgtaagggtacgaattctgtgaaaggctcaccgcctctatctctggccggtggcgcagacgctccagcaacttggctatgtcatcgtgggtctgctgagaggtatgcccggctatgtagtcggggcttttgggtgtcagttcacccaactcgatgaggtaacaatgctcgatatcaaagcctttcggctccaggtaggtagcggcgcgagtatagagatagtccaccacgtaccacatcactacgctcaccaccagcagctccagcaccaaccataggtttgagagccattcattctttatctgtataagaagtttcttagtcattttcttcagcgattaatgtttagtgacacgggattatttatgcaagcgtccacccaatgcatttacaatgcctaccctcgatgcacgccatgcgggaataccggaactcaataagttcagcacaaagcagaacagcagtgcccagccaaaagtagagccatgcagcaatatacttgcatccacggcgggagggctcagcgtctggctgaattcctgggcaaacagcagggtatttcccaaataagcaaacacgacgctcagtaacaatcccagaatccctgccaacagtgtcaccaccaaattctctgcaatgatttgcctcatcagttccagtcttgttgaaccgaatgcccggcgtacaccgatctcagccacacgctggcgcaaacggctctgtgtcatcgagctgaggttgatggcaggaacaatcagtaggatgatgaagataatgaggcgctgtctgcgcgcctggtccacgtccggttcgatgttggcagccatgcccgcggcactcttctcctggtcgtagggacggttgcggtaaatcaacgaataaccgttctcaccgattatcgtgttgtactcctgacggcggcgctccgtttcctcgcggatggctggaaaatcttcgcggctttttgccaggatggtgacgctcatcatccccatgtgttcgtcgctccaggtatccttcgttatctcagtagaggtatagggtacccatacctgcgcgtaagctgtgttggctaaagtagaaacatccttcactacgccggccactgtataaggagcatggttcaagaagaattcacggcccacggcctccgttgtctggaacagccggcgcgccacactttccgtaatcactgccacgggcagtccggcgtcgaacgtagcccggtcataggcctttcctgcaacaaacgaaaaatcgaatacatgccaaaaggtatcatctgtctgcaacaaatcgatacccgttgcaggttgtcccagcagattcacgggggtagaaaccaccatgcaggtataaatcgttaccgcttccggtgtcttcagcgatttaaagcactcgagcgccgtctttatacccatcggtccgttgctggttccatcgccccaactcttgttggtaatgctcatataatgggcgtgcagaaagcggtcacggttactttcaggggcaaacggggccaccttcacctgctgcatcatcaccaccagcatgatgaggaagatggcaagtgccgtaccggctatggtgacggcactaatcatcggttgctgccgcaactgtgcccaagcttgtgtgaaaaattgctttatcatctcaacggcctattttcaaattatcagtatttacctcgcctatgcctcctttagaaatgtcagcatgcccggcagttccactcaaagtaatttcaccgactccacctactttggcagagagataatcgcaaactacatggatgtcggcactgcccacaccacgtaaagccaccctcaggtcacggcaagtcaaatccttcacatgtacatcacccacgcctttcacttcaaactccagcttatccagtttcaagggttcctcacagttgaattcacccacaccgataaattccaccatctttaagtccggagccgagagacggatggtaacaccgtcattttggttgcgcatcttcttatccttgaagccgatggtgagatgaccatccttcactgtgctctccgtattcttcacgtacttctcccgtccttcaatctgtagggagtaactgtcgctctgtgtgaaataaaccgtacccacagaagttatcctgatggatgagaatgcctccaccttacgtacttcactcactttgttatcttgtccccatgcacaaattacgcctgcaaatgccaatgccaatgcgatgataacacctataatatttgtcttcatattcttgcttatttattacgatgattacttactcaaaaaacagataatatatttagtacgaacggatgatatatttgccccaaacaagtgatgtgttcgatacaaacagatgatacgttcttttttatcgttgatattattttcttattcttcatgtaacgcctctgccggctctatcttcatggcttgccgggccggataccaaatacccatcatcaccatcagtgctatcaacagccaagcacctaatgagcctatcaggaaacgtatcatgctccactctaccggccaggtcgcaatcaatgcagtacgtccaatggtgaattcgccgacacctacgttgtaacataccagcatagcaggcaaagtaaccaatgccaacagcagtaacccctcccccataagaagggaaaaaacctgatgcttggtactacccatagccaaccgtaaggctatttccgagcgacgacggcgcgtacgaacccagaaagtgcctatcagccccaaaaagacattacccaaaaggaacaataccactattgtctgactattcactttgtccgtatctccatacatcacttcaaactgtgcctgcatttgcgtgtaaggttccgcatcggcaacaaatatattgtccgtatccagcctcggtgctatctcgcggagaaattgttcccgatagtccggtccgtcggctgcaggctttacacggaaaactatctgtgcctgctgactgccgaattcctcacgcataagttgctcgcccaggcgcataaaaatccaatgagcgtcattaccatagcggtaatcgcggaaactgccgacaatgccaccttgagtaacagtattcacagtatctccacgccatttcatcggtgtgttgagtgaaaattccggtagccgttccttgaaggcatcggcaatagcctgactcaacatcacattattgatgccgataggcaaagcggcaaaagtccgtccttgttcctcctgcatatggaaaacccgggtatatccaccggtagcataaatcatacgcccgttctgcccgatggtatcttgtacagccagcgagttataactatttgcgccactcataggcaaactccaataactcaatgaagcggcctctacagtcggttcttgttccagccttttcaggatattcagatacttgtcggcatcgagcaatgcagtatcacgactctcgcctccctgaaccgtagtaagacgataaacatggtcgatatcatatcccaacggacgatagaaagtatatttcatacatcccagagagtcgcaaagaaaccacatcacgatgaataccaaaaaaagttcggccaagacccacccactattgctcaggcgtgcccatatcatgcgtaagttgtgtaaaatgaatttcataatacttcttgttttatttatcgttcagtgaatctacaattgtccgtcttgctgccatccatgcaggcagtccggcactaagcgtattgatgaccacgcagaaagcaaaagccagcagaaatacccagggactgaacaatgcctccatgctcaagctaaagtcaccggctgtaccgacattctggctattggtaaaaagccaggtacgcattccccatacagctacgtagctgaacaataatcctaccacaccgccaagcagtgtcagtaccaggttctcattcagaatttggcgtatcagtacaccgcgcgttcctccgaaggccttacgtaccccaagctccgaggtacgctgctgcatccggctgttactcagcccgcacaaattgagcgacggcaccaacagaatgatgaacaatgcaatggcatattgcaggtatagcatcgtcacatccggtcctacgttagcccatacatggttcacatgcgccacgatgtcatccggttgctccatgatgtctatctgcatatctcccaatcctgcattgacagcctctatccgtttggcaataccttgactgatagccggaaaatcgtcggatgtacgtgccagcacagcaatatgaacactaccaccataactccataccgaagtcacttccaacttatcggccggatacatactccatacttgtgcgtaagcatcctttgcggtgacagaaacatcctttaccactcctatcacacgcgccggttcgcggttcaacaataactgctgtcccaccgcatctgtcgtaccaaacagtttccgtgccacagaagcacaaaccacaacagcctttgtacctcctgcacgatcctcttcgccaaaaccgtgtcctgccatgaactgcaggctgaataccttccaaaagccctggtcggtctgcatagcatccacctttacccggttgctaccatctgtaagagacaccaaagcggcactggccggaacaaaagcagtacaagcttccacttcggataacggctgtatacattctttcataaatgccggtgaaggagtattatagttttgtaccccctcctctgtcttgctgcttatatgcatggcagaaaagtaaaggcaccgactacggttcacttccggttccaaatcggcatacttcgtttgccaaataatcacaatagccataatcatggtaatggcaaacgccgtacccagtatggaaattgtactcagcagcggattctgcttcaagatagtaaaagcttgtcttacggtttgcatttcatttattgatagttgataattaatagttgatagtttctaagcagtaattattccacctgacgtccgtcgaagaagcggatggtacgcgaggtctgtttggcctgctcttcattgtgagtcaccatcacaatggtacgtccgtcttccttgttcagctgatgcaacagctccatgacttcggcacccattttggagtccaaattaccggtaggctcatcggcgaggattatctccggattgccgatgatggcgcgggcaatggctacacgctggcactgtccaccggagagctgtgtaggcatgtggcgcatgcggtggctcaaaccgaccttcttcaacacctcttccgccagacgacggcgttctttggcagacacctttctatacagcaaaggcagctccacattatccaatacattcagcgagttaatcagatggaaagactgaaacacaaaacccagcttctggttacggaaagcagccagctctttgtccttcatgccgtccactttcgtaccggctatttcgatggtaccgctggtgggtgcatccagtaaacccataatgttcagcaacgtagattttccgcaaccggaaggtcccatgatactgagaaattctcccttgttcacttcgaggtttacattttccaatgccacggtttcaatctcgtttgtacgataaatcttgttgatgccagttaacttaatcataatggtaagtatttaattgttattattctgttctgtttctattccgcacaatttctgcttcaagaggtcaaaagttgtaccaaaatcgtttattattgattatctgctatttatacatgcagtaaggtgtccgaaaatgaacaccttgtccgttttcatctatccgtcacgcagggcttccgtaggtggaatgcgactgatgttgcgcgccacagtttgttctgcttcaacagttcccagacttatttaagtaagactttatcatttcagtttcaacttattcttgttcttatagttactcatatcactcaccaccacttcatcacccggttgcaagccactgaccacttctacaaactcaaagttggaatcgcccaactgcaccttgcgctttacgatttccttatcggaattgcgtacaaaaagttcatactccccacgtcccacataatagctggcattggctatgcgcatcacgtcttccttcaccgcattcatcacgtacacatctgtcttcagaccggaacggagacggcggttattatcttcattcaactgcacggtaaaggatattacaccattctttgaaagcggagtaacactgcttacggaaccttccagcttttcgctgccaatcttcacaatggccttgccgccggcagccacacggtcaccgtaagtatcggcaatctcgccttccaccttgaagtggctcaagtcggagatgacggcaatctgggtcccttcaggaacctgagctccaatctgattgttgatataagtaaggatggccttccggggcgaacgcacctgcgcgtcatcgagcgtacgtttggtttcggccagtgtcttctggaacatgctgaaatccaattcctgcacttggtattccgcagccaacacttccttctcgttggcatactgctgctgtaattgctcgtattccagttgtgcaacgttgtagctcagttcggcttggcgcactttgtcggtggtgccggaaccgaggctatcgaggtactgctcgttgcgcagctccaccttcatgcggtcaagcttcatggcggagactttgattttcatctgaaggtcggtcagcttggtttggttgtcaagtttcagctgctttagcttgtagctgcgcatctgctcttcgtccagcatcttcttgtagtcggtttcggcactctgtaagtccagtttcaggataggagtaccgacatccacactatcgccaccttttctgtacacctccaaaatgcgggtattgatgggcgagttgataatttcctcgaatgccggaaccaccttgccggaggcgctgacactgacttcaatcgtgcccttgcctactttggagaacacaagatctttctctttcactcccgcacgcatcaatgaaatgagtacactgaccactacgatacctgccacgccgatagcaccgtagcggataattttcttattgcgttctttattacgcacttctttcggaatttctctatccatatctttaaattttattgtttgcgaacataacgcttaatatatactaaattcatgccaaaatcataacccactgaaagtaagcgaaaagacaaaaaagaagggtgtccgttttcggacaccctgtacattttcggatagattctttatcttaatctcaaacggtcgccaatctccggcacgtattccgcatccttgcgattcatcttataaaggttcttcagacgaatgccgtacttttgggaaatggagtgcatggaatcaccatccttcacaatgtagacagtatggggtttagcggctttcttacgcttttctttcaagtagatgatgtctcccgcctccagtgtgtattctttatggagatcgttgtatttcaccagtttcttccagctgatgtcaaactccttacccaaaatcttgaaggtgtctccatcacgtgccacaacataagctatatcgttggcaatgtatacctgatgcggattggccagccagggcttctttttcagttccttctcccaattgcgggcatcgcgcttgctcatgccacgactgtcgtacttatacagttcataatcctcgatgatggttatcaggcggttggcatacgacgggtcggtagcgtagccggctttcttcaagccgcgcgcccaccccttatagtccgtaatcttcagcttgaaaagaaaggcataacgtgctccccgtttcaggaaatcggaatggtcttcataagagtctttcggattgcgataagcgcggaaacattcattgcgggcatcgtcatcatgcctcactgtccgtccgcgccagttacctccgcacttgatgccgaagtggttgttgcttttgcgcgccagcgcgctgtatccggcaccgctctccaacagcccttgggccagcgtgatgctggcaggtatcttatgacgctgcatctgctccacggcaaggggggcatactgtttgatatactcattgtagcgagcattccggcgttgtgcctgcactgttgtaatggaaataaaaagaaatgctatgatagcagtcagtctgaaaatccgtttcatgcttaaaatgttgagttctgcacaaaagtccgtaaaagaattgaaataaccaatctctttcctatctttgtaacattaattacaatataaccctttaccttatgaaagaattaaatatcgaaatcgccgtcaagatatacgactatgaagaactggatgccgccgaccgcgaactgatggatgccgcccgcgaggctaccaaccgcagctatgccccttactcccacttctcggtaggagctgcagccagactggcaaacggtattgtagtgaccggcaccaaccaggaaaacgccgcctacccttccgggctgtgtgcagaacgtaccaccctattctatgccaactcccaacatcccgaccaggcggtaaccaccctcgccattgccgcacgcaacgagcacaacgagttcctggagtctcccatccctccctgcggcgcctgccggcaagtgatgctcgaaacggagaagcgcttcaagcatcccatgagggtgttgctatatggcaaaaagggaatctacgagctgaagaatgtgggagaattactgccactctcgttcgatgcttcggccatgaagtaacagaaccaataaagtattaacatcgtgtctgcaggaaattaatttcttgcaaacacgatattaacttcttgacgacacgatattaatatcgcaaaaacctttgttattcagtggaaatcattacctttgcacccactaaccaattaattccaccgatgagaatatccgactaaagacaacacatttcggtaaacatcactatcaacatgctttttcagactgaacgctgagcatcacctatatagatgtttagccaatactgtgtttgtctgtacctctccccttcgagaatttcaatttcggggaatgcttgcatctcccctatcattcttacttctaaaaacacagtagaaacttatgagctttatcattaaagaccttagctatatccatacggataaagaaatcttgttttcacacatccacttgagtatcaactccggagataaaatagccctgaccggaaataacggttgcggcaagtctaccctcatgcgtattttggcaggagacttgtcaccaagttcgggaacggtgctacgccccgaacatctgtactacgtgccccagcacttcggacaatacgaccggcaaacgatagcacaagctttgggaaccagccacaagctgtccgccctacatgccatcctgagtggtgacgctgccgaagcacatttcaatacgctcaacgatgactggaccgtggaagagcgcgcccaagccgccctcgacagttggggactgggcggcatcccgctttcccgcccgatggaaggactaagcggcggcgaaaagacccgcatcttcctggcaggcatggagctgcacaacccgacagccatcctgctggacgaaccgaccaaccatctggacgcggacggacgggaacgtctgcataacctgctacgacgaacatcggccaccgtactcgtcatcagccacgaccgcacgctactgaatctgctgcctgccatctgcgaactctcctcccagggtttgacgtattacagcggaaactacgacttctacaaagaacaaaagaccctgcaacagaacgcccttacccaacaactggaagagaaacagaaagccctgcgccttgcccgcaaagtggcacgcgaagtagaagagcgcaaagccaaacagaatgtgcggggagaaaaagcctccatcaaaaaagggattccccgcatcctaatgggaggactgaaaaacaatgcggaaaacagcagtagcagactcagcagcatacatgcggagaaagcggaaaagctgcagacggaaatggcaggtatcaaaagttcactgtcgcagacggacaagctgaaaacagacttcaacgcctcccatctgcatacgggcaagattctggttacggcaagggacgtcaacttccattatcccaactatcccaaccatacagcctcccccgcagaaacaccccacacggagacgactgcaaagagcctctgggcttctcctctcaccttccagctaagaagcggcgaccgcctcagcttgaaaggaaaaaacggcagtggaaaaacaaccctgctgaaactcatcatgggcgaattgcaccccaccgacggagtgatggagcgtgccggcttcacctccgtctatctggaccaggaatactccctcgtccgtaatgagcgcagcgtactccaacaagcagaagccttcaaccaccgccacctgccggaacatgaagtgaaaaccatcctcaaccgctatctctttccccgcgacgtgtggaacaagccgtgcagcaaactgagtggcggcgaaaagatgcgtctttccttctgctgcctgatgattgccgacaacaccccggacatgttcattttggacgaacccaccaacaatctggacatcgagagcatagaaataataacggcaacgatacgcaactacgccggcaccgtaattgccatcagccacgaccgggaatttctgaaagacaccggcatcgaacgggagatacttttggaatgaatcagtaatttaggtaacaacaactgtaatttgtatactgccgttctcataaaaccggcctatttttgtagcacgtaatcatttactaactaacgaacaacgaatatgagcaaaaaagtattaatcctctcctccagtccccgcaggaatggaaactccgacctcttgtgcaacgaattcatgcgcggtgccgcagaagccggacatcaagtagaaaagattttcctgaaagacaagcacatcaactactgcacgggatgcagcgtatgcagcatgtacggcaaaccctgcccgcaaaaggacgatgccgccgaagtggtggaaaagatgattgccgccgacgtcatcgtcatggcaactcccgtatacttctacaccatgagcgcgcagatgaagacactgattgaccgttgttgtgcacgctaccttgaaataaagaacaaggagttctacttcatcatcgccgccgccgaagaaagtgtccccatgatggaacgtaccattgatggtttccgtggcttcctcgactgcctggaagagcccaaagaatgcggcaccatttatggcgtgggtgcctggaaggtaggcgagataaacgacaagccttccatgcacgaagcctacgagatggggaaaaaagtataaagaacgaatactaaacatttatgctacgtaccatcagactgacccttgccgtcatcttctttgcattcatcacgctgttgttcctcgacttcacgggaacactgcatgcctggttcggatggatggcgaaaatacaattcctgccggccgtgctggcactgaacatcggtgtagtactgtttcttgcagtgctgaccttggtattcggacgcatctactgctccgtcatctgcccgttaggagtattccaggatattgtttcctggctctccgccaaacggaagaagaaccgtttccgctattcgcctgtactgaaatggctacgctacggtgtgctgggagtattcgtacttgccattatcggcggactgaactcttttgtcgtgctactggccccttacagctcatacgggcgcatcgtttccagccttttctccccgctctaccaatgggcaaacaacggactggcctacctggccgaacgtgctgacagctatgccttctatgaaacggatgtatggatgaagagtctccctaccctgctgattgccacggtcactctggtagtcctcatcgtgctggcatggcgaggcggacgtacctattgtaacaccatctgtccggtaggtacagtgcttggcttcctctcgaagtattccttgctgaaaccggtaattgacacaaagaagtgcaacagttgtggactttgtgcccgtaactgcaaggcatcgtgcatcaacatcaaggcacacgaaatagattacagccgttgcgtggcatgtatggactgtatcagcaagtgcaggaaaggtgccatcacttacacacgccgcaagccggcctccgctgcagtctctcaggaaacctccgtggcaccggagcaggtaaacgacgcccgccgcgcatttctctctacaaccgccgtgtttgctgctacggcagccctcaaggcacaagaaaagaaagtggacggtggactggctgtcatcgaggacaaaaaaatccccgagcgcgccactcccatcactcccccgggctcactgagcgcccgccactttgcacaacactgcacagcctgccagctctgcgtatcggtatgccccaaccaagtgctccgtccttcttcggacttgacaaaactgatgcagccggaaatgtcttacgaacgcggttactgccgccccgaatgcgccaagtgtgcggaggtgtgtcctaccgatgccatccatctgacgagcctcgccgagaaatcggccatccaaatcggtcatgccgtatggattaaggagaattgcatctgcatcacagacaagatggaatgtgggaactgtgcccgccattgtccggccggtgccatacagatggttccttcagacccggaagacgaagcctccatcaagataccggtagtcaacgccgaacgctgcaccggatgcggagcatgcgagaacctttgtccgtcgcgtccgttcagtgccatttatgtggaaggccatgtgatgcacagaactgtctaaagcagctttatcacccaaatatccatttataatttcagtcctatcacaatgaaagaagacaagaacaagataaaccgccgcgatttcttcaagctcgccggtgcaggaacgcttgcctcggcagcagccctgtacggctgttcgggcaacaagaacaacggggagagcgaatcggccgcgctgggcgagataccaaccgacaagatgacctaccgtaccaatcccaacacgggcgaccgggtttccctgctaggatacggatgcatgcgatggcccacccgcaaacgcaccgacgggaatggagacgaaatagaccaggaagccgtgaacgacctgatagactatgccattgcccacggagtgaactatttcgacacctcccccgcctatgtgcaaggtctgtcggagcgcgccacgggcattgccttgaaacgccatccacgggagaaattcttccttgccacaaagctgtccaacttcagtcccagcacgcacagccgcgaagagtcccttgccatgtatcaccgctccttccgcgacctgcaagtggactacatcgactacctcctgctgcacggcatcggcatgggcggcatggaagccctccgttcccgctatttggacaacggcatgctggacttcctgctgaaagagcgcgaagccggacgcatccgcaacctcggattctcctatcatggagacatcgaagtcttcgactacctgctctcccgccacgacgaactgaaatgggacttcgtacaaatccagctgaactacgtagactggcggcatgccaaagaagtgaatacccgcaacacggacgccgaatatctgtacgccgaactggtgaagcgaaacatcccggccgtcatcatggagccgctgctgggcggacgcctatcccgcctgaacgaccacttgatggcacgtctgaaacaacgccgcccgcaggagagcgtggcttcctgggccttccgatttgcaggtactttccccgatgtgctgaccgtactgagcggaatgacgtacatggagcatctgcaagacaacctgcgtaccttctccccgcttgttccatgtacggaagaggagtttaccctgctggaagataccgcccagcgaatgctgcaataccccaccgtgccgtgcaacgactgcaaatactgtatgccgtgcccctatgggctggatattccagccatcctgctgcactacaaccgctgcatcaacgagggcaacgtgccgcagaacagccaagacgagaattaccgcgaggcacgccgcgccttcctgataggctatgaccgcagtgttccccgtctccgccaagccaaccgctgcaccggttgcggccaatgcaacccgcactgtccgcaaggcatcgacatcccggcgaaactgcaggagatagaccgatttgtggaagcgctgaagcaggaaaccctttaacggacttaccttcaaccctggttgtccattttaaggattaccaatcatatacagattcttctttttgtataactttgcaaaaagaaccatagataaacgatgaataaaaagattttaatcgcaattttaataagtatcgcccttccgggtagtatgctgtccgcacctgccgacagcctccggctgaaaagctacaagcttgatgaagtcgtggtgaccgggacaagaaatgaaacagacatccgccacctgccaatgaccatctccgtagtgggtcgtcggcaactggaacagacctaccagccctccatcctgcctacactgaccgagcaggtgcccggacttttcaccacaagccgcggcatcatgggctacggcgtatccacgggagccgcaggaggcatgagcctgcgcggtataggcgccggagtaaacgcagccggaggacctacgaccagcctgctggtgctgatagacggacatccgcaatacatgggcctgatggggcatcccatcgccgacgcctaccagagcatgatggccgaacgggtggaagtgctgcgcggtcccgcctccgtcctctatgggtccaatgcaatgggcggggttatcaacatcgtcacccgcaagatgcaggaggacggggtgaaaaccaatgcgcagataggatacggttcctacaacaccctgcagacggaagtctccaaccgcgtaaggaaagggcgtttcagcagcgtggtgaccggctcgtacaaccgtaccgacggacaccgtgacgatatggaatttgagcagtatggcggctatgccaaactgggatacgacttcagcgacacctggaagctgtggggcgacgtgaacatcacccgcttcaacgcctccaatcccggcgaagccgacaatccgtatatagacaacgactcgcgcatcacacgcggcatgacctccttcgcactggaaaatcgttacgaccgcacttccggcgccgtgagcttcttctacaactggggccggcacaagattaatgacggctaccaccccggaggagagccccagaagtcgcacttcaactccaaagaccggatgctgggcatatcctggtatcaaagtgccacgctcttcaccggcaaccgcctgaccgtaggtttcgattaccagcacttcggcggagagtcctggaacaaggttgtcgccatcgacgaggcaaaacccggacagcagattggcgaccatatccccggtgtggacaagcagatggatgaatttgcaggctatgtggatttcaggcaggacatcaacagatggctttcactggacgccggtgtccgcatagaccaccattcgcacgtaggcacggaatggattccccaagggggactggctttccatctgccccggcaggcggaactgaaagcaatggtgagcaaaggattccgtaaccccaccatccgggagatgtacatgttccctccacagaaccccgatttgaaagcggagagcctgatgaactatgaactctcctttacggggcagcttttgggaggggccatgtcctatggggtgaacctctactacatcaacggggacaacatcatcatgacagaccctgccctgcgcaagaacgtcaactccggagagatagagaactggggcgtggaaaccaaccttggctaccgcatcaaccgacactggcagatgaatgccaattatagctggctgcacatggagaatccggtactggcagctcccgagcacaaactctatgccggtgcggactttacgcaaggacgttggggcctatctaccggtatacaatacgtgaagggtctccatacctcggtcaccccgggtaaggagaagcaggaaagcttcgtactctggaacctgcgtgccaactaccgtctgtgcagttttgccgacgtctttgtcaagggcgaaaacctgctggcacaacgctatgaaatcaatgcaggcttccccatgccgaaagccacggtgatgggaggcgtaaatatcaacttttaatactgtcgcgaaggagtatactccgcccgatagatatggtcgaagaatggtgcccactcattgtccgtgatgccaatctgcagaccgtagaagtgtgtaccggcttcccgacaacggcgaatctcctccataaaggcaggtgaagaatgaggaatcttgaagtcgctgacccaaagcacatcggcattcatatactccttgccttctttgagcaggcggaacgtggcttccagcatgcaggtggcatctgtatccccgcaagctgtctttgagaagaattcgagcagccttgcccgctctttccttacatcaatcggatggatggagacggaaaaggctatcagaaagcagttccgccgttgacggtcggctatctccaggagctttatcagcagagagtgagcaatcttctccggcttgccagccatgcttcccgaggtgtccagacagacaatcatcggacctttgggacgggcgggcttggtttcgatacgccgggcaggctgcatgatttccgatttataacggaaggtctggagcttgcgagtaaggtatttgtagacgaacaagtcttccagttcactgtcggcggaatgggcaagctcaatgggaagcagagcattgaggtcgttgccggtgctgatgcccaggatgtcacatttggaggagtgctccattttgtagacgtttccctcggcaacgcggatttgctcacgtccttcgttgtctgccatacgccccatcttgtgggtcactttcactatctcggggcaggagcgctggatgcgcacgattttccgtatacgctcaaagtcgacggtattccacaagccgctcatcatgccccaggtctggaagaattcgtccttatccacgcggttctggcggatgtactcggggatgtctttcagattggaacggagcctgcgctcgagggcatctttgcggaaagcaatctctttctccttttcttcgtgcatcttcagctggaaggcgtcttcccagtcgtccaccattttctcccagacttcatcgtccgcatatcctccttcggtaccgaagtggctgcgatagaagcgggagtcgaagccgtactcccggtatttgtcggaaatctgctgaagcaaggcttgccagccgtctttccgctttgccatggaccactccagcacgagtttcatctcatttcgttccgactggcttttccggaggttgtacctctccttctccaaattcaagtggataaactgaatcatggtgtcgtaaaagatacgtgcacagacctcattgcccagcacctgcaccttgaccatggagtcgttcatcacggagagcagataggcatacaagggctcggtatccgtctcagcacactctccggtggctacaaaacggtccagtgcctgcacatagaaggcggtgtcatatcgggtggcggtggtgttcatcttcttcttggttactggaggattattcgtctccatatctcagtttgcgcatgtccacacgcgcccaggctatctccttgcggacgatggagacgtattgagctacgctctttttatcctcttcggagacgaaaaggttggcggacaaatctcttaccagccggtctatgctggtggcggcggtatccagttccgtctcgtaatcacggtcggtgacggagaggtttcccagccaaagttgttgctcctcgccccgttgcagacgccgcatggggaagcacacaccgttgatgtagagatgcttgtcgtcgcggtagagggtgacgcgttcggtgccttcctctttcacggcgccggtgtcggcaaaggcacggatgattgtacgcttgggattgagggggtcggcatacattatacccaaggtgggggcatctttggtgctatactccttcagatttttgtagtccacgataaagatgtaggtgttgcccgtaccatgtttctccacctggtagtagaagtggtccgttatctgcaggtcatcgtccctacggtcgccggcaaggcgggctttgtcgagggcttcgcgcacacggctgactttcaaatcggatttcagcgaggaggcgataccggcaatctgttttgtgtgggacacgaataaggcacggataacaatgtcacggatggcaacgctctcatcaggctcactccataggcagtggtagacgggaagcaagtcggtcatggagacttccgtgcggccgtggacgaaggcggaggtcttgagcagcttcacgatgttcttccagcggcgatcgctgacatagacattgcggcgcaggtcggagtcttgcatctctacgcttgtcagtccgtggcgaatggctgtgatgcaggaaagaacatcgagaggcaaggttacgcggcgtatctctgcttgccattcggcatactcgcggtcggagatttgccattcgcaggcagtcgtttccggatggtcagcagaatcgtccagcagcattttgtagaaagactcttcctgcttgacgcaggtgcagagaatgcggatgaggaagcggtcccatagggcttccagtccctcgccttgggcaggcagttcgttgctggcagctacgagcagtttgagggggagatgcagttccttgtcgccgttgcggaaaagtttctcgttgatgacggtcagcagagtgttctgtatggcagggcctgctttccatatttcatccagaaacacgacgtcggctgtgggcagatagccgtcgatggcacgttcgtacttatcggattctttcagccggctgatgctgacgggaccgaatatctcgtcgggtgtagagaatcgggacatcaagtattcgaaggcacgggcatctgtaaaagcagactttagccgcctggctaccattgacttggctactcccggaggccccaggagcaggatgctctcacctgccagggctgccagcagggagaggtttatttcggtttctttttcgtatactccccggttcatttcggaaaggaggaggcggatgcgttggatcatttccacaatatgatttatttatagtcagtactcatgtataaagaaaagtgtgtaaagataccaaatagtagcgaaatcagagagattcttattaagattcactatttttggaaaacaaatacacacacagacacgcacacacacgttgtgatctgctttcattttagtatctttgacccattggaaacagcgataggaatatacgtgaaattgaaacaatagttgtgatttgctttcattttagtatctttgaaccattggaaacagctgattacaagtaacaatctaatattcaaacgattacacatagtattagaatataaaaaaagaatgctgcttctgaaaaaatcccgccattgcgcgggatttttttagaataattctaattgttgtccaggcgtattcacatccacagtctttttcccataaaaaagtgctatatttccaaattgcttgtccgtaatgcacataattccgacacttccatagtccggtaagaaagatttaactctttttatatgtacctccgcattctcacaactcgcacaatgacggacatatatagagaactggaacatcgtaaatccatccttttgcagattttttctaaattccgcatacgcctttttatccttcttggtttcggtaggcaaatcaaacaacactaatacccacataatgcgatattcactaaaccggtccatcacatctctggataggatattttacgcaactcaccactgaaacatttatacagagaagccgtagtctgcccaacagctaccatcaacggactacgttttcccgaaataacagtctctaatgtaggaattgtcagtaacctcgctttcaattctctcgtcaattcaacacaattcggttctgcttccttgaatatatcatataccaacctatccacataagggcgataaggttccattatatcatctgccagacaataagcattataacgattatgatgatgtattcccaaagtaggtagaagcccacttgtcaccaaagcacgagcaacaactgccctcaaaatagcatacccataatttaacaaattattaggaggaataccttctctatcccttgtaaagccttctattttaaacaaattcttccaataataagcagctgcacgagcctccaaattatcagaatctccactctttacatctgcagcccacaccttcatacactttatttcttctccagcacattcatgcaatactaccgtctgattctctattttggcttttattgtttgctgccaaagttgtttcatcaatggtagagacgcaccaagttgatgacgaaacctttcattttgtgtagtattcccatacaaaggaagcattaaaccaaccggcatacttttagaatcgcaggttatgactgcacaattattctcaagcaaagcttccaatactcccgaagtaatggttatctgcttattgtccaacaccactactccaatatcttctattggcttagtcacttcggacattcgtttgaacccttcgggtaaagcactgttcttcaccacctccggcaatttaatcaccaactgggcattttttaaagacaaatagaccggattcccaaaataaagtgttttcttaatcatagcatatagactttacaagttattcattcatcattttcaagaaaaggaagctctaaagtatcattctgtttatcagaatccaacagaaaattttcaggagaaacaacacttctacccaactctttttcagcttgttcacgtgctactccggctacatttcctccacgttgtgctacttgcttacttttagtaaatgtatctggtttttctttctgagaaatttccgttgtgacacgttctccaagcattgtaaatatcaactccaaatcagacatgtggtcacgaagattctgatttttcttcgtcagccccttatatattttataatccgaaggagtcaatccaaacgttgctctagatatttctgccgtaagaatggcataatcacttttttccgtgattcccctttctttccattcatccgtcaaattctgacgaatggcgattcctctcaaacgtttgtcaatccaatcttttggataacctttttgctcatatagttctttcatgcgctcttgagccaattccggattttctatttcctgtacacgctcataacctacttgtgctaaccaaagcttgaaaggttcagctttaggagaaggaatagattgaatgatgcggaataaagcctgcacatttgccgccaacgtttttcgtttttttcctgtatctgtcaccatttctacctggggacaagttgtccccaggtaagtagccagttcttcatcccgttttcgcatcttcttcagataatccgtaggattcacactatcagtcaatacaccaactacatctacaacagagaaataccattgctgttcttcctcgttccatacggaacggatctttttctcttgaaacaactttatattattcatttactctatacttaacttctataatacggcctaacctatcaacttttactggaatacaaatattctttatcatttcaccatcccatgatttttctgctttattattagaacctaattctttagtggaaataatagcatttgatatactttgaggtataaaaaagcattgattaccagaagatgaaaccatcttataaatcctccccctatctatcggttcatttatcctaccaaaatcccgctcttcttcggttggcagatataccaaatcattaggagacagccaaaacaataatttatctcccttttcatttctgtccggtacaggaacaagcccttgtttctcacgctctataacccaatttaaaggaatagtctcatacgttctgtttccatcttctgttatgtaaatagcaaagaacaagttagtacctttagcagcttccacccatttggcacctttattgccaagtacaccgactttaaatttatttccacgcggttcatacaccctcaccttatatataggctgatgtcctttaccatcattcagttgtaaaagattacggttcatttcttctataccttctgcagaaaaagccaactccgcctttccttcttttgatttcagatgattcaggagtattttctgtatgccagtatccgtcaccgatgctatcttcttctcattgaaagttgagtccaatgatttacgtactgcaactaaaggttcagtagtattttccgtaaaataataaacagcgactttggctatatccagctctttccacaagaaagcattctctttgaaatatttttcaattttcttcttatcatacttatatgataacaattcaagaaccttattttttactcttttgtcaacaatcatagaaggagtatccaaagcgacagataggcgtaccacctttacctttcttaaatttaccgctccaaaaaccgtatctttgtgcatcggtttacggatagcccaactatcaccgattttctgtttctcataaacacgagtcccatttgcatcaaaatgttgatagatattggttgttttatttattatacgcaaattctgtttcaagctaactattatcccactcaacgcttcccttgcatcttgcgtaaaagtagtccatggtttctttataatccatctataattaccattaccatcccccctactcttatcacacaacagtctctgcaaatcataacgggaaattttcgcattccggcttgcagactcattattcagatagtttacatgattccgtgtagcacaagctattactattgcatccatagcatgatgccgatggtctatacgcttcttactgaatcctttctgatattcaaggggcactgctgtttgaaaaactttttttccgtctttattctcccaatgtccaaaacactgggtttcggtcaaagcatttaaacgttcaaaacgaggacttacaatactattccagacgtcattcatgccccaatcctttttcagcctgtccgtcacgtttcctgtacaaactaatatgttttttgaaacagcctccggttcatattcaccgctatcattcttttcacgaacgatattcgacaaaagtcctttgacaaccttactgatataccggctatcgtttaattggcgttcaataaattgctcgggaatatcatccatcaacaatttcttcatttttatgcccgattttgcatattgttcttttacaaaacgttcgtaactatccacagaaaagatttctactgtctttccaaaacccacttccactttctgtccatgatgattcttgataaactcatatcccagttgattatctttcaacttgttcacagcagattcacatatcactttgttagagaatgaatcatcaaaatagcgggattgaggtataacatgttctatctcatacgcagcagtaaataatttagccaaaggtatcagctcaccggtataaggtgaacgatatttctgttccagccataatttataacgcaagaattctgatttcgtcggtaatttactggtattgaattttttcaatatcacatctatatcttccggaatctgttcttccccctttaaaactgcatcctcataaatccgcaatatttcttgttgacttggtgaatagggacggacattctctaccccatattccggattcacaaattcagcaagcaatgcctttatacgtaaattggcattttcattctccagaatctgagtagtcattctttttcgcttgtccgcaggatttttcatctcgcgccctaactcaatatggatttcatcaattttcccaacctgtttccaaatatccctgacaactctcaatgtctcggttatcacttgttctacgataggatttcgtagtgaatgttgcttaaaagcagccagataagcatcaatatcagcaggggtttcccatttggttatttctttatcttcggaatgacgattatacactacataacaagccaaccacaacggaagcctcttaaaacaagatatatccgacaagttcatcgccttttctctaaccttggcacctatactctcatcacactcacctgctattatcctttctattctttccttggttgtaccatcaatcaacgacatatcccaatactttccgcacctcatcaaaggcaacaacttctttatcgccttggcagaataagcgccatattcagacttgaaaggaggaaacttcttgaacacttccacaaaggattcattcaatccgttcttaaccgcaaaagtcgccaatgctttctctatttcctgcttgtcacttacagaatataagatatgccacaaggctgtttctttttcatcagataaaaagtcaataccaataccggccttttccaaacgggaaagaatcgcatgtctcgtctcattacatgggtagaacttatcctcgacataattccaacgataattatttatttcctttttcagtccaaacgcaggatatctcagaaaagctttctgatctatttcctttcgagagttcagccaatcaaatagagccacataatcatcttctgttttcaaaaactccgttgtcacatccacatccaaatataaagttccatttacttccctttccttttgatatacccgaatattggaaaggaaatgccataaacggaattcctgaaaaagaggatgtgacttggctatacactttaacggagctgttttgatttcacctgttttgcggtttacatattcattttcctcataagggcaattagctatcaatgactttttggttttcaacggcctttgataaaacaagacatcatctattaacaaatagataaagtcccggttagctatatttctccgttgcacttcattacccggatacaacgcttcaatacacctcatgtataaatctctatcctgcaattctgcatgaaaagcacattgcttctgcaaaatcaagttcagttcctccttgtaaaactttcgttctactgttttcaccaattttcctattatcttttgttgtggctcctgcaacaaagcatcatatatataactcccaatcgttttatgagtaccggcaatgtccgcttcggtccttttctttattaacatccaatcatcctctttaggcgctctgaaagaacgcttcacctcaccatacttatcaagctttggagtaccgtccggatttaagtcagtagtgacaataaactcttttacccatccttcccagtccaatgggacattactgcttctacgatatacccatccattctccagatgtacattataccatatatcccggcctttcttttcatcagtcgcttccaccgacaagactttcaatgcataaaattcaacagattttcctgcattgtcttcctcctcttctcctctaagctgataataaccacgtttctgattaaagttcaaaagaatccatgccagttcttctttacttatcatttctgtcaaagctttcttacggagataataaactgtccagtcataagggatttttttaccatcaaaaaccaatgaaggttggtgctttgcaaaatccgccaacatttcattaaacgctgtctgaaataaaaaagagtattttccccatctatcctttacccatggcaatttcggttcgctgcctgacaagaatttacccgtatgcttttcaaaatctattccttttaaatagtgttccggcaggaagccaagaatcttcaaaactttatgcaaccgttcacggcgtagtaattgtcgctctctcaatcgacgcacccctctaaaacgggttctttcagctgtctgtgatatagaattccctttgtcaaagtctcccaagatagcagcatccatcggaattattctactgccagccatttctatccaaattttctcggtctgttctttaattacagagtttattacagcccatcctatactattggttcccaaatccaatccaagtatcgttctcatagtattatattttgaatattttcttcaaaggtattttttttttcaatataagcattgtatttccatatttattttatacatttgtcatactaaaatgaagcaagtcacaataaggattattccgttgtgaaaacattaggttccctcgtccttaacgggggattttttatttccaaaaactaattatcatttccaatatcccccttttgccgaaaactaaaactttcctccccaaacactactcttcgtatcactatattttatacctttgttcactaagaaataatcgtcacatacccatttccgtttcgtccgacagctgtcggacgataattaaacaactgttggacgataatgcaacagttatcggacgattagtttttaggaagaagaaaattaatccgcttagcgacaaaaataattccccgaagcgacgagaactgtttatcgctataaacaaaaataaatatcttatgagcgcgtattacgacctttacgaaacgccttcgcccgacgggaaagaagacaagaaatcactccacgcacgtatctgcccgaaaaggacttatacccaaaaggagtttgtggaacatatcgcaactttccaacatctgcccaagaatgtgataggggcagcattggatgcctgcattgacgagttgtgcgacctccttgccaacggaaacatcgtggagctgggagaactcggattcttcagcacttcactgaaatgcttgcgcgaaaccgacgacgagaaaaagaaaatccgctccgaatccgtccaattccaaaacgtacacctgcgcatcagcagcacgttccgcaacaacatcaagaagaaaatgacgttggaacgtgtacactccactaccaagaaatcgaaaaaagtagtagagaccaccgaagaaacaagaaaagccgaactggaactgttcctcaagcagaatgtatgtatcaacaagaacgaatacatccaattgagcggactgaccagacatgccgccatagacgaactgaacaacttcatccggcaagggttcctgcgccgccgcggaatgggaaggtcaacggtctatgtacgacaagaaaaagacacagcaaacgaaatttagggggggggggcgaacacagagacacaaagacatagaaattaatgctttatctctttgaaaagaatctctgtgcctttgtattttcgtgttcatcccccaaaaaataataaaacaacaaacaatggaaaaatcaacagaaccccaaccctgcactcagtggttcgtcttcttcaaagaccaactgctactgaaaaaaggatatacagacaaaggagaaataaaatacagcgtacccgtcagtatagagcctcctctgacaccggaagccggaagtaatatacacgaagtgttcccccccaacggcaagcaagtacgtgcatttgccctgaaacagcctgtgaccgagagcgacgaatgggtaatgataggcctgcgcgcatcgtacgactacatcaccccggacgaataccgttccgcaggaaaggccttccagatactctattgggacgagcacagccgcttctgccccgtgtgtggcaccgccatggagcaccagacccccatcatgaagaagtgtcccaactgcggcaatgagatgtaccctcccgtttccaccgccatcatcgtactaatacgcaaaggaaacgaaatcctgctggtgcatgcacgcaatttccgcgggaccttctacggactggtggcaggtttcctcgaagccggcgaaacactggaagaatgtgtggaacgggaagtttttgaggaaacggggctgaaggtaaagaacatcacctacttcagcaaccagccctggccctaccccagcggattgatggtgggtttcattgccgactacgaaagcggagagataaaactgcaggaagatgagctgaccgctgccgccttctattccaaagacaacctgcccgaaataccacgaaagctgagtatcgcaagaaggctgatagactggtggatggagaacaattaaaaattaaagaattaaaaagaggggggaagaaatttaaaaaagcaaattgcggaaaacacacactcacaaacgaacaactacgaatgaaacgactctcattcacatcaaccaatcggtgtgtaaccgcaatctgcatatactaaacttccctgcaaacgttttgttcatcaaccatcgggtttaagtctttatttaagttttctttcaacacagaagcaaaaagaaaaggcgcagccctcacgggttacgcctctccaaacactatatacacattttttcctctttcctatcaaatgccgagtgacttgcgcactgcctccactttcttttcagcttcggcatcagcgccggcatagcatttcggacaacccatctcgcccttcacctcgatatagaacttaatcttcggttccgtaccggaaggacggacagaaatcttcgtgccgtctacagtgaaatattgaagtacattggaagtctcgggcatatccagcttgcttacattaccccggacatcggtagcctccaatgtcttgtaatccttaatcaagctgacagccgaaccgccgatttccttcggaggattggcacggaagttatccatcatcgccttgatttcttcggcaccgctcttaccgggtttcaccacgttcacggtggtttcctttgagaatccgtattctacatagatttccatcaatacgtcatagagtgtcttgccctggtctttggcccaagcacagatttcggccagcaaggagcaggcagaaaccgcatctttatcacggacaaagtcttcggccaggaagccatagctttcttcaccaccaccgatatactgctgcttgccttcgctcagacggatttcgcgggcaatccacttgaagccggtatagcaatcgcgcatttcaatcttgttcttatctgccacagccttgatgagttcagtggtcacgatggtcttcacgatgaagtcattcggctgcatcttgcccattgcaatacggttcttgatgatgtagtacaagaaaatgagacaagtctggttaccattaataagcacccactcgcccttatcgtccttgcaggccataccgacacggtcggcatccgggtcacttgccatcacgatgtcagcgtcaatcttcttggccagcgcaatggccatggaaagggcttcggcattttcgggattcggagaaaccaccgtcgggaaattgccgtccttcaccatctgttcgggcacgcagttgatattctcaaatccccactccttcaatgagtccggaatgagcacgcggcctgcgccatgaagcggagtatacacaatgctgaggtctttctggcgacggatgacttcggggtcaatggagatggagtgaaccatgtccagataaaccttatccacttccttgccgataatctgaatcaagtccttgttgccgttgaacttgatgtcggtcaccgtcaccttattcacctcgtctatgatggctgtatcgtgcggagcgagcacctgcgcaccgtcatcccaataagccttgtagccgttgtattctctggggttgtggctggctgtaatgttgataccgctctggcaaccgaagtggcgaatggcaaatgaaacttcgggcgtaggacgaaggtcatcaaaaagatataccttgatgccgtttgcagagaagatgtcggcagaaatctttgcgaacttgtcgctattgttgcggcagtcgtgccccacaacaacggaaatatccttctttccggcaaaacatttgttcagatagttggacaagccctgcgttgcggcacctacggtgtagatgttcatgcggtttgtaccggcacccatgatgccacgcagaccacccgttccaaactccaggtctttgtaaaaactgtctatcaattcggttttatctggattttccaacatgcgtttcacttctgcctgagtttcggcatcatatgccggggtaagccatttttcggctttctcagtcacctgcttaatcagttcctgattttccataagactgttattattttaagggttaatataaacttttttgtaagacacaaatgtagaagaataagttcaaatatcctaattttattcaggcattttatatctgtctcccgtctgcttaacatactcttcaaggaactccttcgggtatcccgggcggattacgcctgccggctggccaatggaattacgttcgaattgaccgtttttcatacgtttgacaacgccgtcattatactttacgacaagaaactcgccaagacgtttccaagtatcgaaggtactttgagcggtcatgttcgtatagttggtaagaaatgcctttgctttggcaggatctttttccagcagtttggcagcagcagcctcaacgccttcctgcgcttcgttgaaggttgtctccaactctgtctgagtggcacgcacgtcgcccatcatcaagtcataacggggataaaccatattggccacccagttgaaaatccagaaagcggagttccaggagaaagtgatgtaatcggcgccgtccacacgggtgtagcatacgggaaccttgtccgtacagcagtatacaggtgtaaataccgtcatattggcatcatccgtgccgaaccacaatactccaccgatagggtcgggcaactcggaacgcatctgtgccacgaatacgaaaccgctctgctgggtggagatgggacgctcattgaagtattcctggtcacccaccttgaaagagagtggagaaaggcggtacggggtatgatacgggcctgcgccgaaatctttgctgatgtcgagaggagtaccttcataatggtcgcgcatggcgttcttcacatcctgcacggaaaccttgcggttgggcttcacaaacagaggcatcggagtgtccgtctcacccaatatataaggcaggaactcgttgccgcggtcggtaaacatattaaaatagctccatacgcgtgcctcgcaatagcgacgggcaccgaaatcgagcggagcgtaggcatcggcaaagctgaaatccttgttcacaccgtcaaaatagcccttctcgcgtgcaaaagagatgacgtcggcagagtacatgcagttttccttgtcattcatattgaactgatgaatgcggctctgattggcatgtgcggagatacaatcatcgggcacgcggacagctacccatacggcaccgcgcacaccgggtcccttgccaatcatctccataatccatatctcgttggggtcggcaatggtgaaggattctccactactgtaatagccatattcctgcaccaattccgtcatcaccttgatagcctcgcgagcagtgcgtgaacgttgcagtccgagataaatcaagctaccgtagtcgataataccggtagtgtctaccagttcggggcgtccgccgaatgtcgtttcaccgatagtgagctggaattcgttcatattgccgatgacattgtacgtctgacgcgcctgctctatctgcccaaggtatttgccggtgtcccactcgtgtatgtcaatcagcgtacctttcttgtgcataccggcagaataatgatacaactcgccgaacaaaccataagaatcggcagaataggaaacaatggtagaaccatccgcagaagcgttcttgcccacgataagattggtgcaggccagcgcattcgccacggctgccacaacaaacaagacggaaagagtcagtcttttacttttcatacttctaaattataatgttactaaatatttcagtctttaccatacaaaatcaaactgttcggtggtacggttgccacagccatccgtcaccgtcatctccaccacgtgcttgccgcctttctccacatgtttcgggtcgagctcgcacaccaggttaccgctgatggaattgggctttccaaacaaggcatacttcccgtcaatcgtaccccgataggtattgatgccggtttccttgtccttggccttgaagatgatttttcccgtacgtccccattgggcttggtttacgggagttatcaccggcggaaccgtatccaccgctacggtataagtccccaaatcccgtatacgcactttcatgacaccatcctcatacttaccgccgatgcggtattttccaccgcgcgccgttacgcccgccacataatatttggtcatatcctctaccggacgccggcgcaagccgatacgcaaatcgcaggcaccgtgcataggaatacgggtatcgttcaattgataggtgaaagcgatgtcgccactatcagcccgcacggagtagttcagcaagacgtcatcgtagagcattcctttcgggataaccaactccagccccggctcctgcagatagttcaccttatcccatttgagggcgtatttctcacgatgttccaccggagcaattatcgtcttctgtccctgcactgtgaagcggaccttggagatatttcccagcgcatctctcagcgtatagacaaaccggtaagggtgttcttcgttgatgtccaccagtccgcgattgccgttggatgcctgtagcatgcgcaagtggttgcccggctctatgaaagacttcatgtactggccgtgtgtccacgaattgatatagcggttctcctcataggcaaagcgatctaccgtactgcggaagacttcctcgccgtccacttcgagaatcaccgccttcacgccatatttattctgcactccgtccatatagtcgtaggcacggatacctgcaccaatcagtccccaggcggtaatgggttttgttggatgtgccggaaaagcccgtcgcgtctgcttgccctccaccactccttttcccggctgtggaaacagcatgataccttcggcacgcggggcagtcttgtctttcaccttgttcatgaagaaaggcaacgggtctatatattcgtccgtagccgtctctatcatatccagatgcaggtgcggaccgaaagagtaaccggtgtttccgcttaaagctattatctgaccggccttcacgggatattcatcggggtcgggagttatttccacctcccagctttctttttcatattgtaaatcttctatccgacgggcaatgtcacccacaaaagcactcaaatggcggtttatcgtcgaatagccgttgtcataagttacatcgagcacataacctgagccgtgggtgacgcggatacgcgaaatatatccgtctgccagagcgcgtaccggcttgcctatggtgccacctgtcttgaaatccagtccgccatgaaaatggttggcacgtatctcgccgaagttaccggagaaagtgatgggaaaatcaaaaggcgggatgaaggaaggcttgtctgtatcggtttcttgggcatagccgctttgcacactaccaataaagaacaaaagagagaaaaatatagaatatttcatattttgtacagtcaatattattttaaatgcatgcaaatataaaaagaatagttctctctacctacagaaagctacaattatcattgattaaaacatgcataaaaattctgttgaagaacatagatgcaccgataacacccaagccgggaaatcgctatattgcgccatgtttaaccccccaattaaaactttaaggttatgattatcggagtacctaaagaaatcaagaacaacgagaaccgcgtgggaatgacccctgccggagtagccgaattggtgaaaaaaggtcatacggtgtatgtgcaggccacagcaggcgtaaacagcggtttctccgacgatgactacatcgccgtaggtgcaaagactttaccgaccattgaagacacgtatgccgcagccgacatgattgtcaaggtaaaggaacctattgcaccggagtacaaactgattaaaaagggacaagtggtattcacctatttccactttgcagccgataaattactaaccgaagccatgattgaaagcggtgccgtctgcattgcctacgaaaccgtggaaaaagaagaccactcacttccgctacttactcctatgagtgaggtggcaggacgcatggctacacaagtaggagcccgcttccttgaaaagccacaaggcggcaagggaaaactgatgggcggagtaacgggcgtacgtcccgcacgcgtacttatccttggaggtggtatcgtgggcaccaatgccgcacagatagctgccggaatgggtgccgaggtactgattgccgacatcaaccttccccgcctgcgctacctgagtgaagtgatgccgaaaaacgtaaagacactctattcttccacccataacatcaagatggaattgccgaacatcgacttggtaatcggttccgtcctcatccccggtgacaaggccccacacctcatcaccagcgaaatgctgaagatgatgaaacccggtacggtactcgtagacgtagccatcgaccagggcggttgtttcgaaacctcccaccccaccacgcacagcgaccctacctacattgtggacggaattgtacactacgccgttgccaatatccccggcgccgtacccttcacctccaccatggcactgacaaatgccaccctgccctacaccgtagccctggcatgcaaaggctggagacaagcctgcaaggacgacccggctctggcgcagggattgaacgtagtggaaggcaaagtaacatacaaagctgtagccgacgtcttcgggctgaaatatgaagccattgagtgataagtgatgagtgatttgttggtgtttttctttcagcatgatagcgcagcacaattaccaacaaatcactcataactcctccccaacaaagaatccttcttcctcgcatactcccaccacatagcgagcagtgtgatgcagaggttgaaaataaacggaaattccctggaattagtgtggaacaaggtctgaaagaaatctgtaatgaacggggacaatagaatcgccagataattcatcaccattacaaaagccagtgccaaagttgttttttccggtatggccgtatctactgtctcgtcataaatcagcggttgaatgacaccatatcccaaaccaaccaacatacatcccgatattatcagccattctttaggcgaaatccatatcaagagcaaacccactgcaatggacaaaaggctgtagaactttgtgtgtttccccatccacttcacgatatgccccaggaagaaacccggagccataatggcaaggaagaataaggagatcatcaatccggaatttccgctggagaagtgatgggcctccatcaaaaaaggcaagtcaaaagtaaccgccagcactatatacgtagtgacgccataaaacagcatcaactgtagcagatggcggatatggatgccgtatttaccgggaaccgcacgcttggattcctccggaacaacggcagccgtatcttctgctatctgcggctgaccggtatcccccttcaaatatccgacaagcagcagagaaaccaacggaagcagatataccacgaaaggcaagtgccagtttacctctgccagatacccagtcaccgccgttgccacaaccagcgtcacattggtgatggcagaactgtaaccaaactgcttcacccgatattcccccgtgaaatagcgtgaaaccagaccggtggacaacggaataatcacccccgaaccgatgccaagcaaagcgctgaccaccatcaactgccacattttgtccgaaaaaagataaagtaccccactggcggcaaacatccaaagtcccgctttcagcagacgcacaaagtcacgtttctcggccagcttgcccgccaacagcacaaaaggaattatcagcagcgaaggcagggaggtaagcatctgtatatccaattccgtggcatgtggaaaaatggtggtaagctgtcccaaaataggtgacacggccaaccccggcaaggaagtcaatgcagagacagaccaaatgccgacaagcgtgattagggggattgtaccccttccggtattgattttcatatagtagtatattaattaaatgaataatgtgggaacaacaaacccaccttcagaatgttcgttttttaagattttactacgctgccctttaataaacgccaaataatgcaaaaccccggaactttcatccgcaaaccccgttgttgtgggatattcgacggggaaaagccccgccgcctaaacctttaaaaaacttattaatatggaagatttgaatttcagaaaaggagatgcaaaaactgaagtattcggctcaaaccgtatgttacaaccctcacccgtagaaaagattcccgacggacctactaccccggaaatcgcctatcagatggtgaaagacgagaccttcgcccaaacgcagcctcgcttgaatctggctacattcgtcactacctatatggacgaatatgccaccaagctgatgaacgaagccatcaacatcaactacatcgacgagaccgaatatccgcgcatcgccgtaatgaacggtaaatgtatcaacatcgtggccaacctctggaactctcctgaaaaagaaacctggaaaaccggcgcacttgctatcggttcctcggaggcatgtatgctgggtggtgtggcagcctggttgcgctggcgcaagaaacgtcaagcacaaggcaaaccgttcgacaaacccaacttcgttatttcaaccggtttccaggtggtatgggaaaaattcgcccaattgtggcagattgaaatgcgtgaagtgcctttgacactcgacaagaccacgctcgaccccgaagaagccttgaagatgtgtgatgagaacaccatctgtatcgtgcctatccaaggtgttacatggacaggactgaacgatgacgtcgaagccctcgacaaagccctcgatgcctacaatgcaaagaccggctacgacattcctatccacgtggatgccgccagcggcggtttcatcctcccgttcctctatcccgaaaagaagtgggacttccgtctgaagtgggtactctccatcagcgtcagcggacataaattcggcctggtttatccggggctgggttgggtttgctggaaaggcaaggaatatctgcccgaagaaatgtcattcagcgtaaactacctcggtgccaacattactcaggtaggcctgaacttctcccgtcctgccgcacagattctgggtcaatattaccagttcatccgtttgggattccagggttacaaggaagtacagtacaactccctgaccatcgccaagtatatccatgacgaaatcggcaagatggctccgttcgtaaactattccgacgaagttgtgaacccgctgttcatctggtacttgaaaccggaatatgcaaaagctgccaaatggactctctatgacctgcaggacaagctgtcacaacacggttggatggtacccgcctatactctgccttcaaagctggaagactatgtcgtaatgcgtgtcgttgttcgccaaggattcagccgcgacatggcagacatgctgctgggtgacatcaagaatgccatcacggagctggagaaactggactacccgactcccacccgtatggcgcaggaaaagaacctgccggtggaagccaaaatattcaatcacggatgccgtacacataaaaagtaacagctaatatggaaaagaaaatatcaatttcacaaataaaggaggttgcccaagaagcctacaacgaggtgaagggcagtacgggaggcaagaatgcggattatatcccctaccttgccaacatagacaccaaactgttcggactcagcatctgcctgatgaacgggcagaccatcaatataggcgatacagactatcgtttcggtatagagtccgtctcgaaggtacacacagccatccttatcctgcgccaatacggcgcacagaaagtgctggacatgataggtgccgatgccacgggactaccgttcaactccatcatcgccattttgctggaaaacgaccacccttccactccgttagtaaatgccggtgccatttcagcctgttccatggtgcagccagtaggaaactccgacaagaaatgggatgccattgtacagaacattaccgagctatgcggctctgccccgcaactcatcgacgaactgtacaaatcggaaacggctaccaatttcaacaaccgctccattgcctggttgctgaaaaactacaaccgcatctacgatgatccggatatggcactcgacctctatacccgccagtgttctctcggcatcacggcccagcaactgggcattgccgcaggaaccatcgccaataacggtgtgaacccagtcaccaaacaaacggtgttcgaagccagcctggcaccgaaaatcacgtcgatgatttctaccgtaggcttctacgaacattcaggcgactggatgtacaccgccggcataccggccaaaagcggtgtgggcggcggcgtaatggccgtattgcccggtgtcatgggggtatcggccttcgctcctcccctggacgaagcgggaaattccgtaaaggcccaatcggcaattaagttcatcatgaacaagctcggtctgggtgtgttcaacggtgataacgtgacaattacagaataagattttttagttatgagttataagtgatgagttatttgttggtatatgcatcgtaattagcaaataacttataactaataactcataacttcataatggacttcatcatgaaaatggctctatcagaatttgtattgcgggaaaaaggtatttacggcatattacatgtcatcatactgatactttcgttatttttagtcatcagtatctctgtcgacacgttcaaggggattcccttttacgaacagtcagtctacatgaaagtacagctgtggatatgcgctctgttcctggctgattttgtgttggaatggtttctggcagagaagaaggggcactatgtagccacacatttcattttcctactggtagccataccttaccaaaatatcattgcctatatgggatggactttctcaccggaaataacctatatgttgcgctttatcccattagtacggggtggatatgccatggctatcgtagtgggttggctgacgtacaaccgtgcatcgggactgttcgtttcctatcttaccatgctgctggccaccgtctatttttccagcctggccttttatgtcatggagcatggtcccaatcctctggtcaaaggatatggagatgctttgtggtgggcatttatggatgtgacgacggtaggttccaatatcatagcagtcactcccaccggacgggtactgtctgtactgctggctgcgctgggcatgatgatgttccctatctttacagtgtatgtaacgagcctggtcgaacggcgcaataaggaaaaagaagagttctacaagaaagcggcacagaagcccgcgcctaaagctgatgcttcctgaatagttaaaaccggaattttcacttatccgttgggaacaactcttcccaagtgttgttatagacgctgattttgaatatatttttcatctaaaaccttaacttatggcaaatattaaacaaacagtgaagctgggggtatttaccctggcaatcatgaatgtgacggcagtagtatccctacgtggacttcctgccgaggccgtgtacggaatgagttcggccttctactacttatttgcagccattgtttttctgattccgacgtcacttgtcgccgcggaactggctgccatgtttcaagacaagcaaggcggtgtgttccgctgggtaggcgaagcctacggaaaaaagctgggcttccttgccatctgggtacaatggattgaaagtacaatctggtatcctaccgtattgacattcggtgccgtatccattgctttcatcggcatgaacgacgtacacgacatgtcactggccaacaacaaatattactcgctcgtcgttgtcctcatcatctactggctagccacattcatctccatgaagggtatgagctgggtaggtaaagtggcaaaagtcggcggcctggtcgggaccattattcctgccgcactgctgattatcctaggtatcatctaccttgccaccggcggacactccaacctggatttccacagcagcttcttccccgacttgacgaacttcgacaacgtggtgcttgctgccagtatcttcctcttctatgccggtatggaaatgggcggtattcacgtaaaagacgtgaacaatccctccaagaattatccgaaggcagtgttcatcggtgcggccattacggttatcatcttcgtactcggtactttctcactgggtatcatcatcccggccaaagacatcagtctgacacagagtctgcttgtaggcttcgacaactacttccattacatccgtgcttcctggctgtcaccgattattgccatcgctttggcattcggcgtactggcaggtgtattgacatgggttgccggtccgtccaaaggtatctttgccgtaggaaaagcaggctacatgcctccgttcttccaaaagacaaacaagctaggcgtacagaagaatatcctttatgtacaaggtggtgcagtaaccgtgttgagccttctattcgtagtcatgccttccgtacagagtttctaccagattctgtcacagctgactgtagtcctctatcttatcatgtatatgctgatgttctccggagccatcgtgctgcgttataagatgaagaagctgaaccgtccgttccgtatcggcaagaatggcaacggattgatgtggctcatcggtggtcttggtttctgcggatcattgctggcattcgtactgagctttatcccgcccagccagatttcaacaggcagcaacacagtatggttctccgtactcatcatcggtgcgctgattgtagtcattgccccattcattatttatgcttccaagaaaccgtcctgggttgacccgaacagtagcttcgaaccgttccattgggaagaacaacccgctgtacagacaaccggtaaaagtgttacaaatatggctaccggtagcgccactaccagcaacaatggcacaagtaattctaccacaagtgggaatatggcaaaagacacaaccaatatccccaaaggataaaaggttataagttgaaactaaaaaaggaatattcccggtgatttcggggatattccttttttagtgttatatgataccagaagacgggaatagtcagagatccaattcctgcattctctcccacgcccttctgctctcctccaccaactcttgcatgaccgacgccacagactgcactccctttccatgcagcaaggcagatacctgccctatttccagttccccttcttccaagtcaccctcaaaaataccacgtttggcacggccgcgccctaaaaggatacgaagttcttcctctgaagctcccacagcctcagcagcctctacggcgctgcgaaagttattgcgcaccagacgcaccggagccaacttcttcaaaagcagacgggtatccccttcttccaaatgcaagcagtaatccttgaacacctcgcttgcagaactctctgccgtcaaggcaaagcgtgtaccaatctgcacaccttccgcacccagcacccgggcagccaacatggcctcacccgttgcaatgccaccggcggcaatcagcggaagtgtagtaactgcacgtacagcaggtatcagacacagagtggtagtctcctccctcccattatgcccaccggcttcgaagccttcggcaactattgcatcaacacccgcctcttcagccttcacggcaaaacgcgaggacgaaacaacatgcaccaccgtgatgccacgctcgtgcaaccaaccggtccatttcttcgggctgccggcagatgtaaatacaatcttcactccctcgtcggccacaatctgcattatctcttctatctggggatacatcaagggaatgttcacaccaaaagcatgatgcgtagcctcacggcatttcctaatatgctcccgcaacgtttcgggatgcatcgaacctgcgccgagcaagcccagccctcccgcattgcttacagcagcagcaagtctccagccgctacaccacaccataccaccttgaattatcggatatcttattccgaatagagaagtcactctgttcattattactttttttaaaggtttactaatgaaaacaagaaggggagaaagaaagttcaaaatttgacaaaaagtgataaattactgttgttccaaaacagttatcgaatctccatacgccttcaatacttccagcgtacgggcacggcgcttgcgacctttgaaattccaaaactcacgggtaaaaggcgccatcaggtctaaaccggaaattccaccgccactggtaccctgccaaccgcccacagccatattattggcccgctccgtcacccggtaacgcaaaccggttgcttcaatctgctccaccgtctcacgcggaccagcatcaaacggatgtttagcccagttcgtaggaatcatcagaatcttaagtgcataaaattcgtctccccgccaagtatctttgtccaccttaatctttttctggtaaatggggtcccaattatatttagtattggccgtataagggcgtagggtaagcacaacctttttctcgggcactttcggtatgacgggcagcgaattatcaaaatccatccatgacttgtccgtcaccgctttcggagtacctaaggaactgttcatttcaagttccttcaatacctccgggttcagcttcacctccccttctcccttcagcaaccagttcagcctcaacgagtcttgagaagtccaattttgggcataaaaagggaaggctactgcacagagcaaccccattacaagtataaatctcttcacttgacagtttgattacttaatacctaatccttaatccctaatccctaaaaacatttcaccaccacatatatccactgccacaaagtggttcgtcatagcagggatcaatcgtccacatagtccgtggatacttacgggtttcccaccaacggcggtagcgcgaggcggcatccagcacctcttcgtccgaaaggaagtaaataccttcataattctccgcatccgtatgcaccatcttgcatcccattgaagcgttgttcccgagacggatagtctctaccgtccacaagatgcattcgcccaaacgcaacttaccacctgccgaataggataccggagccaaggggaaagagggaataaccgtcaagtcctcggcatacttcagcaattcctctatatcttcggaagtgaacttgggcatattactcaatccatccggactttgggtagaatatttaccagccttcaactgcttgacaaacaagtctacatccggatggttgtagtccaacgtttctttgctgcaagagcccaaagagagaacagaaagagtaaagaatatgagcagcatagtctgcccgaatatatgtaatttattgtatagagtcttcatatttgtatggtatttaagattaataagtcatgcgcacgccgcacaacagattcagattggtgggccgttccgtacgcaaggttcttgtctgcgagtccgtatcgaaatgatgggatacagacggctctgcaaacaaggcaaaacggtcgttcattttatagcgtacccctactccggcagcaaccgacaactgtaccggctctgcgccgaaatcattgtccggagcacctgcaatgcatttctcggctgctccgcctaccatagcatagaaatccactttcggcgtactggccagcatcatgttcagccttaccggaacttccagcgtatgcaacgtatggtcaccatccaagcaattatactgaagaccagcttccaaggagaaatgcttgttcaaacgacgttccacgcttaccccggccgtgaacggcatatgaaaattccctttcggcagggaaatgccgatgcctgctttcaatgcccaattacggggcttggatggcgatacagccacagactttgccggttcttcctcagaagatggcagcattctatctatatcagcatccttatggccaggatttgaatggtagtttccgtttccggccggagttccgttactgtaataaccgtttcccggctgctgccggtttccgtacacccgttgggtaatccggatggaaacatggacagacacggattcatcctcatcggcctgcgccgtcaatcctgccggaatgccgttggcgggatgctgtgtaccgggcttttgtgccatggggttggcctgatggatagagggaaaactttcctgcaccacatccccgttcaagttaccttccggcgtcatggccgccacttgtgtaaaggcctccttgatttcctctttcggagagaaataccagaaagcggcagaagcagctcccagtacaaatacaacagaggcggctgcggctacgcggtgaaacctcggagaaagaaaaagctgcctcctgccttttgcggcaaccggtgacggcaagtcacgttgcaacccttcccagaagtcctcccgcactgtcatctctgcgccggcaagacgactgcggaataaaccggttatttcatcattttctctcatattcagtatattctttaattctttttattaacaaacacttggcacgatgcaactgcgaggtagacgaatgctctttgatgtggaggatttcggctatttccttgtgcgatttctcctcaaagacgtataagttgaatacagtacggcatccatcgggaagttccgccacgaacgccatcagcatttcttcggaaatgcggcctccggtttcggcaatgcccgcttcatccggaatgtcgggcaattgttcctcattcaccaccagttggctgaaacgttgctgtttccgcaggtagtctatcgcctgcgtcaccattacccttgtcacccaggtacccaatgcacattcgccacggaaggtgaagtgggtgaaaattttgatgaagccatcgtgcaatacgtcatgggccgcatcgacatcgcccgtatagcggtaacataccgccagcatctgcttggagtagagggtgtataattcctttcgggcggaatcctttcctgcccggcagccctcaatcagttctatctcattttccaatgtcagtgctcgttttacggacgcctcttcgcgtcgtttgttagttagacgcagcattgcggaaaatgctgctgaattaattctaaaaagaagttaaagaacggagattatttatatttggctctcaaagcctgtatttgcttgtccagcatctcatccaattcatcaaattcatgccaatacagaaaaccgggaaccatgttgacgtaattgataaatttcttatactgcacaagaaacaaggcctggtcccgaagactgtcgtcaccatcaaaaacatgcgccaactccctggacatggcagcactcataagagcatctgttttcgttgcatagtaatcactgacatccttttgtttcctgcccaactcaaaataagtctgcaatacatcctgcaacatacgtttgtccggtatatactgcatcaatgaagaacctttcagcacgtccagcgcatctgtcctataagagaattcatccatattattgaaaagcttgccatacttccacagagtatctatcggtatcttggatacatccatatcatgttccctcaacaacagactcatgtgtatgtcaatatccaacaagtgctttatattacggagctcctgcctattatattccaactcttccgttaccaactgcatcgtagcacgcacttccttttgacgggcattctcggtaatccggtcacttccccagaaagtgacaatgatacccgcagccacaatactgaactgacggaaataatcacctatgtgccaactttttaccgtatggttcagcctattaaagtttatctttcccatatctttttattctaaatgatacttcttttcaagcgcttgtattgcctcgtctatacgttttcccacacgttctacatagtccggcgtgaaatagttctgcgctaccctgacaaagttccgtaccgacctgtccgacaagtaaatatcccacgcctcatatcctccacgatttatctggtccgtctgttcgtcagtcaatgccaaatggaaaggaaccataatttcgtccttcatatcgtaatagccattcatagttgccttaaatccatccaatacctcatagattccggtcaactgcaacagtagctctttatctgaaatcttctgcatcaacatggagtttttaagtatatccaatgcattctgactataataaaaactgcggatatgccccataagaaagcggaactgtatcaatgaatcttccggtatcgtccgatgctttaagtcatgctccaccaataagctggaaagacgttcatcctctctaaactctgaaacgatactcttataattttcccggttacttttcagttcatccctaatcagcgacatggtggcttgaatatcctttttctcggagttttgagtaaccaactcactaccgacaaaagtaatcagtacgccaatcaccacaatggaagtctgccggatgtagtctcccacttgccaatctttgacagttgtttttactttattccatgttatgtttttcatatcttcctacactattatccattactatgaaacacatcatccgttatagccaaacgcatcatctatccgtcccaaacagaccatctgtttcaccccaatacaccttctgtttttccaagagccactactttgctagttaccaatagaaagcctctcataaatctgccgtaatgcagcattctttatgagaggctttccttattattctgcaataatgctttccgcctttatcaacatgctttaaagctcatgtccaatcctttcacggagtgagtcaaagctcctacggaaataaagtctacaccgcattcggcatagtcgcggagcgtatcaaacgtgatgccaccggaagattccgtttcatagcggccacctaccatctccacagctttctttgtcattgccggggtgaagttgtcaaacatgatacggtctacgccacccaggtcgagtacttgctgcaattcgtcgaagttgcgcacttctatttctatcttgaggtccttacctttttccttgcaatattccttcgcacggttgatggccttgtcaatgcctcccgcaaagtccacatggttgtctttcagcaaaatcatgtcgaacaagccgatacggtggtttacaccgccaccgattttcaccgccattttctcgaggatacgcatgcccggagtagtcttgcgggtatcgagtacacgggtattcgtacctttcaattgctcggcatacttatgtgtcatggtggcaatgccactcatgcgctgcatgatgttcagcatcagacgctccgtttgcaacaaagactgtatcttgccttccacaatcatggccacatcacccggctttacggctgtaccgtcattaataaacacttccaccttcatggtagggtcgaaacgacggaacacctccttggctatctcgataccggccagtatgcccggttcttttatcagcagtttggacttgcccattgccgtagcaggaatgcatgaaagggttgtatggtctccatcgcctatatcttcggcgaaagccaggtctatcagcctgtcaatcaattcttcttccttattcatctgttttatctatccttatttgatgtataacatatttgttctgtacttttctgaagaaacaattcacccgaaagtttccatttgcggtcgtcaaggtaccaatgacgaaaccagactcatcacgtttcccctgatggttcacattaaaactgccaaccttgtggttggagaagaaagcagccattgtgccctctgccgtccgcttgtcggcgtgggtcgacttattctgaatgattaaatcgaccttgtcacccagatacttgttgagttcctgagagcttccttccttgaaggccccaatcactccctcgggaacgttctgggccagcagcacagacgtccaaatgaagagaccggtcaacaaaaagactacccgttttttcattttcacaagtatttatgataggcaaaggtaagcatttgtctcaaaatacaataaaaaaatgctaaatttgtgcgctaatcaaaacagaaccagtatgaaaactactctgctcgtcgtaggacggactgtagaacaacactttataacagccatcaacgactatgtgcaacgcaccaagcgctatctctcattcgagatggaagtcatccccgaactgaaaaacaccaaaagcctctctatggaagttcagaaggaaaaagaaggggaactgatactgaaagctctccagccgggagatgtggtcgtactgctggacgaaggtggaaaagagatgcgttccatagagtttgcagactatatgaagcgcaagatgaataccgtaaacaaacggctggtatttattatcggaggcccttacggattctctcaaaaagtatacgaagcggcacacgagaagatgtccctctcacgcatgaccttttcccatcagatggtacgcctcatctttgtggaacaactctacagggcaatgaacatactaaatggggggccgtatcatcatgaataattaaaatgctcgggcagccagcgtacaatagagcgcaacactatgcggtgttctacgcaaggtttgatgtacacttgtaaaggtgctgcccgttcagctcaatagcaatactcaccacattctcacaggtaaacaaggagtaaggcagagtgttcgtccatcctcccaccatatccatacgtacggagctatgtcccccatactatttggaatggcttttccaatcaagttcgttatttaaaacagagaaaagaattgattaagagttaagaattgtcgaaaaaatattattaaggattcttagtaaatttctcagtaataaaagatggaaatacacatgaacaaatacaaacaattaatagcgtgcaatacacgatactaacaacatgtcgtgcaagaagttaacaacgtgtcatacaaaaaacaaatgaaggtgtgtcgtaatgcacgatgcaccttctttcttgtttatcaccgatataaatcggtttattttcttcaagctgcgataattcgaagatttctttgatttatgtgtctccagcatctaaataaagcgacagtaagctcataaaaccatcctatcagccagttcataccttcttttgtcagttttgcacacatcttttttatattgaaggcaatggctaggaaggcaaagtccatgaagaccttgtcctttccaaaatgtcggaaacgtttgtagttcatattgtttttaatttgtccgaacacggcttccggttctatgcatctctgccctctgtgtttcagtcctttctctgagcagagcagttctttggctctccgcttgtattgtctaagcctatgattcagttctatcgtcctgtttccttttgctttaaaacagcggcatcgcaggggacagccttcacacctgacagctctgtaccgtgcattttcgctgacatatccggatgcggttttcacattcctggtgcctatcctccgcatcctttgccccataggacagatgcagaagtcatgttcttcattgtagtagaagttttcggccttgaacgggtccggtttgaatctcggccgctgctccatgtggaaatagttgtactttacgtaggcttccatgccgttttcggacatgaagcggtaattctcttcggagccatagccggaatcagcaaccaccgtatgggccatccggtcatacctgtttgaaaaagattgcaggaaaggaatcagggtcagtgtatccgtagggttcgggaagagtgcaaaatcggtgatgaactgattttcggtgccgatttgaaggttgtaaccgggcttcgtctgtccgttgcgcatggcatcctccttcattctcataaaagtagcgtccttgtccgtcttggaataggaattcctctcttgcagtgtttccagatggcagtcgtattcctgcagtttgtccctgtgttcttccagttccttcagctgtttgcgtttctttttcagttcagtcttttcctctttcgcggatggctcggaaacctgttccaatgcatgacgcaattctcctgccatttcagtcagcatggccggagtgaactcaacctcctcattgttctctgatgacttctcccgggcaatgacatcgtctatctgccctaacaggacatgtatcttcttcatcaggcgttcacggttccgctcaaccgtttttcgccagacgaaagtgtacttgttggctttggattcgatctttgtcccgtcaatgtattccacattcaggctgatgaagcctttggaagagagaagaagtacggtttgcgtaaacacctcgttgatttccttcttcacccggttgcggaaacggttgatggtaatgaaatccggtttctcatatccggccagccagatataatggatgtcacggtgaagaagcttttcaattttccggcaggagtagatgttgttcatataggcatacagaatgaccttgagcatcatcttggggtggtaagggctgcggccgcattccttatacagctttctgaaactttcaagattcaagccctcaaccagggcgtcaaccatgcgcaccggatcgttttctgcaatatcctcatcaattctttgaggaaaaagaacggtttggttgggaatgtaaggacgaaaatgtatctttgtcatagtgaaattcttatgcctaaagatacagaatctttaggtaataacaaagccccagcttgtgaaagtcggggctttgtacgtaaaataatgaaggtgtgcattttgacacaccttcattaatttgcttttatacaaagctatacgaggctgaccacctgctgcaacagccccggcaattcaaaagtagcattcttgatatccgaaatccggttcttgccttctgtcgtaagaaaaaaacgcatctgacgcttatcttccttacctatcagacgggtaatgagtttcttttcctctacggaacgaatgacctttgaagtgttggaggcagacaaacccagtgcctcagctatctcactggaggtaagcttaggagtattgagcagcgtgcacaacagcattccttcattcagtgacaaatcgtacatctgcgtaaactgcacctcgaattcggcaatagcccgataaatatcacgaattttacataaagtctccatatctttttctcctatataaataagttcacatttgctttgtccgcacgttccatataggtagccacgccaccgatggttacttcatccagaagttcttcgtgccggatgcccatcatatccatagacatctggcaagcgatgaattccactccttgcgccaatgcttgcgagcgcaacgactccagagaatccacacccttgcgcttcatcaggaagcgcatcatgcgactgcccatgccaaacatattcatctgcgacaacttcagtttcaaagaactggacggcagcatcatgccgaacatcttgccgaagaaatctttctgcacgctgggtttctgcactttcttcaagacgttcagtccccagaaggtgaagaaaatggttactttctgtcccgttgccgctgctccgtttgccaaaacgaaggttgccagcgctttgtccaggtcgtcactgaacagaatcagcgtctttcccctccccccggctacgggagtgttggaagcggatgtacaagccggagcgcctttttcgatgactaccgtatagcgtcctttctcgtcatgcttctctatcaatttatttcccgttgtatcgcaccaggcagaggcgtcgcgggcaaaaccggcatcggtagccacaatctccacacgctcgcccacagcaatgctatccatcgccttcttcacctgcatgataggtcccggacattgcaagccgcaagcgtttatcttcaacggttcctttttggagacagatgccgccgcaggaacatcgtcgttgtcagcagaggcagccgaagaagcagaagaagagtcacctcctgccggagcagatggagacggcagaggcgccgttgccatggaataggtcttataaccacctatcagattgcgcacattgcgataaccgcgtcccatcaggatgcacagggacagataaccacgcaaacccacagcacagaaaagcactaccggcttgtccgtaggtatctctgccaaatgctcgcgcatttcatccaacggaatattaacagctcccggaatggtgccgaaagagaactcctcgggcgtacgggtatctatcagcatcactttatccttctcttccaccaactcgcgccaagagatgacgggcatagcaccgctaataatattcgatgccacatatccgccaatggcgatggggtctttggctgaggagaaaggaggtgcatacgtatgctccgtctccatcaaatcgtagactgtgccaccctgcttgatgagtccggcaatctggtcgattcgcttgtccaccccctcgtaaccgatacattgcgcgccatagagtttaccggttttaggatggaaagtcagtttcaaagtcaaaggcagggcatccggatagtaaccggcgtgagatgccgagtgcgtcaccgagctttggtattccatgccccactgcttcaagcgtttggctgcaagacccgtagaagctaccgtcatgtcgaatactttggcaatggaggtgccgatagctccttcgtaggagacggtattgccaaacaccatattatcggcaacgatacgtccctggcggttggcagggtttgccaggtaattgagccacggctttccggtcagcggatgaggatattcgatggcatcgcccacggcatagatgtctttttcggaagtctccaagtgttcgtctacccagataccgcccatctcgcccaacttcaagccggcttgttgcgccaatacagtggcaggacgcacaccgatggagagcaacaccatatcggcaggaatggtctttccgcttttcaggaatacagtgattccgttgtccgtacgcttgaaatgggtcacgccttcttccagatagagggagacgcctttctgtaacaaatgctgatggatgggtgccgccatggagaaatcgataggcgccattacctgattacccatttcgactacggacacatggacacctgcatgatgcaggttctctgccatctccaatccgatgaaaccggcacctaccaccacggcgcgcttcacctgcttgtctgagatataagccttgatatggtcggtatcttctacattgcgcaacgtgaagatgccttcggaattgatgccttccaaggggggcttcacggggttggcaccgggagaaagcaaaagtttgtcatagctttcgtcgtactccttgccttccgcgttgcgtatggtaacagtcttgtttttgggatggatggcgattacttcattctgcacacgcacatcaatgcggaagcgcttgctgaaagattcgggtgtctgtaccagcagcttctcacgctctgctatcactccgcctatataataaggtaaaccacaattagcatacgagatgtaagggcctttctccaacaaaaggatgtcagccatttcgtccactcttctcagtcgggcggctgccgtggctccacccgctacaccgccaatgattacatatttcataattctttgtttttttaagtttgacgatgcaaagaaaagagttattttcgataaaacataatttccagaggaaaatatcattaagagacttatttttaatgagaacggacataaaaaaacggattattacaagttgttacacctataataatccgttctgtatacaaattttctataagctaccaaccaagtcgggcaagaccggcagcactataccatgaagtagaacgataagcagcattagcagcttgggcagcagaagaagtggcagtggaaggtatataatggctaaccccatttgcccgttttatggagaacataccaacagacatcgaataaatcattggcgtttttttccaacagacagaagctgcatcatatgcttgcttccattcatccaaggcaacttcatccacaacgagtttttccatcatttctacgaaatcataatagcctacataataagacgatcctactttacgctgatcataattaaagaccgatgaccgaagaacttctctatctgctgtcactcccgacaaaacatttgctgtagcagcagctaagttctcaagctcagaagatttcagcacatctatagcagtgcccatcgtccaattgctattactccctatttttccagtataaattttcatcataagcagcaaaagtcccaatagccatttctaccgctgcacctttctgaaatataaatggaaacattctatcataggcagcaccaggacctggattctcagcagggaaaccaatatagtaatcgcaataatcacgcaactcatacgcgacttccaccgactgcataaagcaagcatcaaacataataaaatcaaaatgaggagccttctgtaatactgacttcaagtcctcaatattcatataatgtcctcctccagtcttatcatttcctatccagcgagtagaaggcaatggagtaggtatccatccttccccatgcgaccaataaatcaaaccataactttccgctttatataaagaattcccaaacacatcattgaatacctcctgcgtctcagcgactccacacgaatttctatcttcatattctttgactattgtttcaacaacagtaccacctttattttcaatttcaatcaaacgaggagatcccgtatctatatacaccaataaatgcatatcagatgtattatcaattgaagccatcccagctttcaattcctccaaatccccatccgtaaagctagccaatggatttatactattatccgctgccatatataccagcacagtacgtttcccatcaaccggaggatcaggtatcgggtcgtcaccacggcacgccgacatgaacaaggggaaaacaaagaaaaaaagaagatatagttgtgttttcatacttgaaatcttattcctgcggttttgtaaacgtgaaagcctcaggcttcaccacctgcaaaaccatattcttactctttttatacttgccttttacctttacagcctctttttccaactttttcttgttttcagcgaaataaatcatgcaagtataatcaggtttcttcagattgtactccagatagttcttaagctggtaagtgtataaatcacgcttgggcaagaatccattcttatccagctctacgctgtccaatacctggatgtctgtataatatacgatggagtcattgaaagaagccgccaccccaaaagcatatacagccttttccttatctttcattgtaaaagccgaacacaacgcaaaaaccaaagctacggcacaaagtatacgaacgtatttcattgagttatgagttataagttatgaattatcaatggggcaaagatataaaaaaaaccgcacgcctactaaagacgtacggtttttaattccttctatttgtcggaaactgatatttcttatttatcccaaataagatttgagcaatttactacgattactttgtcttaatcttctgattgctttttccttaatctgacgcacacgctcacgggtcaagccgaatttgtcgccgatttcctctaatgtcatttcctgctgtccgataccgaaaaacatctgtatgatttctttttccctatcggttaacgtagaaagagctctatcaatttccctcgcaagagactcgttcaccaaagagcggtcagccataggggagtcatcgttgaccaacacatcgagcaagctgttgtcctctccctctacgaaaggtgcgtctaccgagatatgacggcctgacaccttcagcgtatcagagattttgtcaacagggatttccagttcatcggcaagctcttcgggagacggacgacgttcgttttcctgctcgaacttggaaaaggccttgctgattttattcagcgaacccacctggttcaacggaagacgtacaatacgcgactgctctgccaaagcctgcagaatggactgacgtatccaccatactgcataactgatgaacttgaaaccacgtgtttcatcgaatttttcggcagccttgatcagtcctaaattaccctcgttaatcaagtcgggcaaactcaaaccttggttttggtactgcttggccacagatacaacgaaacgcagattggcacgtgtcaatttctccagtgcaacacggtcacccttgcggatgcgctgagcgagctccacttcctcttcaacagtaatgaggtcttcgcgaccgatttcctgcaaatacttgtcaagagaagcgctctctctgttagtgatactttttgtaattttaagttgtctcattcttactaatacagatttgggttgcaaaggtacgacaaattattttgttacaataatctcatcctaactttttcaccttatttatatcttatcctatataacaaaaaggatgccggtatgtattgtaccgacacccccttttcgctattgttagctaatattacaatcttcttacctaactatccttattttttattcttgagtcaaatcaacggcatacattgcacgttttcctgacgggaacataccggtgatgaacaaaccttgctcaggagactttcttgcctctttcatcgccttttccaaatcgtctaccgtcttcatcggcactccattggctttcagaatgatgaagcccttgcggatacctgcatcggccatcttaccattggtaaccccggtaacttccagaccgtaccccaggttcaactgcttcttcagctcggaagatacgggcttgaaggctgcacccaagatttccattccggcatccttcactaccttcgtagtgccttgctcattcttcagcgtgatttcgaattccttttccttcttgtcacgaaccaccgttaccttcactttgtcgcccggacggtgttttgccagcatttcctgcaaatccgagaacttgtgaatcttcttgccgttcaatgctatgattacatcgttttccttcaagacgccggcagcggaaccaccttcaacaacttcggccacatagataccctctttcacaccaagttcgtcggccttcttcttcagctcttcagtccagcgttcgtccatctgcaggtctgtgctcaaatcactacccttgatgccaaggagcgcgcgctgcacggtaccaaactgtttcaagtcggctaccacctttgtcataatgctggtagggatggcaaaaccatagccggaataagcacccgtgggtgagtaaagcatggcattgataccaaccagctcgcctttggcattcaccaacgcaccaccactattaccttggttgatggcagcatccgtctgaatgaaagactggatgtttgcagcttgtccattggaggcagaagagccaatggaacgggcttttgcactgacgataccagctgttacggtagagttcaggttgaacggattacctactgccaatacccattctcccaccttcaactggtcggagtcaccaaccggaattgtcgggaagtcatccccttcaatcttaatcaatgccaagtccgtgctggggtcagtaccgatgatgcgtcctttcagctcacggtcgtcattcagtttcacggtgatttcatcagcaccttccaccacgtgattgttcgtcacaatatatccgtctttggagatgatgacacccgaaccgaaacctacacgcggctgggtctgtatctggcgctggcgtccacgaccgtctccaaagaagaagtcaaaaatatccggctgttcttgtaccgtctgggtcttactcaactgagtggcacgtatatgcactacagcatggagcgaactctccgctgcttgtgtcaaatccacaggctgggcatccgttgcatggaaagccgccggtagcagattattggggttctgttggaacaactcgctgaatgcggcaggcttttccttattcagcatcttataagtggtcaatccagccactccagagctcaggagcacgatagccgcaactccaaggatgttttttgttgtctgtttcatactattcttcctattctttaaattgttaatattcaagtttcgtttaacattacgacgttaaaataacgacaaaaaacgttcagttattccgcttgtcactcttttttgttctcttttaacagaggatatttagggcttaacagcggttaacggcaaagactgacaaattagcatttatgtacgattgctgactgttaaagaactgacagatagggcataaaaagacgcatcacccgttgcggccgaaacggatgatgcatttggggtaaacagatgatgcgtttataccaaacagatgatgtgttcgggctgaacgcatcatctgtttttagagagcagatagcaccttaataattcaagtaatcaatgtccatgtggtagtcccactgcgggaagtagaggttacctccctcccactccacctcgccacgctggaagtcgacggtctcgctgcggggatactgcttttcgggctgtagcggcatgccgtaatcagtgttcacaatcatgcgccaagagtctataccacccaggaagaaatattcttcgtcggcattgcgggcaaaggcaggaatgccgaatgactggtcgacaggcacccaacccacaccctcgaagtagacttctgcccaatcgtgcagattccatgcacggggatgcatcataaagccgctctggaaatgtgcgggaataccactgatgcggcaaagcgtaatgaacagcaggctgacttggccacagtctccgtgacggttatccaacacatattccgggatattctcaatggtggaatattcgcgtgcagaagcccacgggaagttgtcattcacccaacggaagatacgtttggctttcaggtaggggttggtttcacctgctgtcaatttggcagcaagttcgcgcaagcgcggggaaaagacgatatgcttctcacgctcggcagtatattccttataaagggcggtcgtcgtatcatagggctgcacgtcttccggcttcagattatgccattcgccgttggcggtaaactcaaaggtttcggagaatacggtcggttcgccttcgacagcacgtttctccatgtacaatgtactgtgacggcactcgggcgacgaaaaggtgtattgcggttcgctggccgaaatgaacttgacatcctgctgccgggcctggtcctgacggggatagggtaaccagcaacggatgattttcccggcaggcacggcattggtatctacggtcaacgtgtaggtgacgcgcatgcgcttcggcgcaacaatggccttgccctctttcttcacagcagaaatgatttcgggcaggttctccatattcactttctcgctgccactcggcgaagtgccttccttggctatcttgatgtcatagcaagtggagtccacacgaaacagattaggtccggcattgcggaaatagcgtttctctccatccagcatcatgcactccaaagctttggaggcttcccactggcgcatctgctcatcggtcacgtcgggaatatacttgcggatatagtccttcacctgggattccgtcatacagaaatccgtaagcagacgttggtacaggtcgtcctcccaattatagggcttgctctcgggcttcgtgctgcatgcagaagccatcacaaacagagcgacggtatacaatagctttctcataacttcaccactccaatacccggcaaatcgggcaacgttatcttacctttcacaacctccatacccttgaaacggtcgttcgcaatcagcagactaccgtccaagtcggcaaagtccactgccggagagaattgggaggcagcggtaatggcacaagaggtctcggtcatacatcctaccatcactttcatgtccaatgcacgtgccaaagtcaccatcttccaggcttcgcgcatgccggtacacttcatcagcttgatgttgatgcccgtaaaggcacccttcaagcctgccacatccttcagacgctgaatggactcatcggcaaatatgggcaacgggctttgctgggtgacccatgcaatatcgtccagttgttccttgggcatcggttgctctatcatgacaattcctttttcgtgcagccaatgtatcatatcgagcgcatgatgtttgtccttccaaccctggttggcatcaatggcaatcggaaggtccgtcaccgaacggatggtctctatcatttccttgtcgttctcccgccccagcttcactttaaggatattgaaccggtcggcacactctttcgtcttttcacgcaccacgtcggccgtatcaataccgatggtgaaagttgtagagggagtcttttccttgtccaaaccccatatcttataccaaggggcttgcaacagtttgcccacaaggtcgtgcaaggcgatgtccacagcagttttagcagcggaatcccctgccgagaggctgtctatataagccagtatatcttccagctgaaaggggtctgagaattggccgataacatcctgcaccttcttcagaaaagccagtacactgtccatcgtgcctaattcgtgttgcaggtacgggggcatggaggcttcaccataaccgataatgccatcatattctatctcgacttgaacgtcgggagtggtagtacgcgagtaggtggccactgtaaagacatggcgcaatttcagttcataggggaagaaacgcagtttcattttgggggttacacctgccctactgttcacgttgaacaaggaaggagcgtcatttcctccggcaaatacatgattgattgccatgcctgagccgagtgcggcaaaagcggcggttttcaggaaatctcttctgtttgacataattgtgtgtgtattaaatgtgccaatatgctaatgggctaatgtgccaatggactgcgctatgtatatgctacgttatgtttgcaccgtcacgccgcaggtcattggcatattggcacattagcacattattacattgaataaaatggattcgtttccgttgtattgagcgacgcctccttatttatataaggtaacacgcgcgtagcgaacaacagtctaccgaggttgtattcatcgaacagctcgtcgtcgaggctgaagctattgacgcgcacatcgccttgcgaatggatgaaacgcttgttgccgatatacatgccgacatgtaccacacgttccttgcgttccggcgtcgccttgcgcccgaagaaaatcaaatcgcccggctggaggttactgaaatcaggagcgatatcgatatgctcgcccacgtatgcctgctgggaagcatcccgcggaatgatgatgtcgtgcatgaaaagaacggtgcgcatgaagccgctacaatccacccctttggaggaagtgccagcccaaagataagggatgcccatcatgctatgcgccgtggctataatgctggcggcatcctgcttcaaggtggcacgccatttcttctcaggcatggagatggatttggagatatatccctgacggccgtcgggataagccaccttataaaaggcaccttttgtcccctcccacttcaggcggtttcctgcagcaacatcagagacggtctgcgatgcctggctgggctgtgagtagacaaagccataatgcgaagtcaccactattttctctgcattgttccaagcggtcagctcttcccgcgtgacgggatgtatgcctactcggtgtacccatgcaatgtagttgtccggtgtctggatacggtaccagccgtcgcgctgcaacacccgcaccggcatacccatcaagccttgcgtcatcatttctgaagagaaatccggggctacccgaagattgcacacagacacattgacaatgccatacgtcttgccttcaagtccggcctcatccggaagcacttgcagacaatccatcaccgcatatcctttctttgccaaaccatccagcaaagccgtctttgcctctgccgaagtggtgacaccacgcaacatcacattctttccggagaaagagtaatccacatcgaacaaagccacgcgcttgtccggtgcaaacttttgtttcaaactgtcagcgagttgcgccacttctgcaggtattgtacggtcacccacttccgaagcgacagcaaaaagcgggattaacagaaataaagaaaaaagagaggataactttttcattggccaaaaggatttgggggttattactaatagcaaagctacgaatttattccgaaatagatacatgtttttaagataattaagggtaaagaatgaagaatgaaggattcatccgtactgcatccgcacactgcacaacaaattcttcatccttcattcttcattcttcattaatattccgtatctttgtaccctataaagcagttggtcggtctgtcgcttgcgcctcgtgcgtatgaggaaagtccgggcaacacagagcgtcccacttcctaacagaaagctgtccgtgagggtagagtaacgtagaagaaaataaccgccgtcgcccttgggctacggtaagggtgagaaggtggggtaagagcctaccagtcttgtggcgacacaagggctgtgcgtcttgggagttgtaaggtcatgtaaaccgacgttatgagagttgctcgctccatgtcggagggtagaccgctaaagcttgtatggtgacatgcggctcagataaatgacagacacttctttaatggagaatggataatgaagaatggataattcctaattaggctttttcagaaacagaagaacagaacccggcttacagactgactgcttttttattgacaatggataatcgagataatagcatgaacaagcgtattgctgccctttggaaattcctcacctacgacatctggcgtattacggaagatgaagtcacgcgaacgaccttttccgtatacaatatcatcaagacgatttatctttgcatcaaccgcttcaccaaagaccggatagtaaacaaagcctcggcgctgacttacagtacgttgcttgccatcgtgcctattcttgccattttgtttgccatagcccgcggtttcggattcgataatctgatggaaagccagattgtcaacggtttcggcggtcctacggaaaccacggaagtcatcctgcaattcgtgaattcgtatttgtctcagaccaagagtggaatattcatcggagtgggtctgattatgttgctgtggacagtcctgaatctaatcaacaatatggaaatcaccttcaaccgcatctggcaggtgaaaaaggcgcgcagcatgtaccgcaaaataacggattacttctctatgcttctgctgatgcccattctgctggtggtgtccggtggtctttccatcttcatgagtacgatggtgaagaacctcgaagactttaccctgctggctcccgtcggcaagtttatggtgcgcctcatccccttcgtgctgacctggttcatgtttacagcactgtacgtctttatgccgaatacaaaggtcaagctgaaacacgcactcatatccggtattctggcaggtacggcacaccaggcattccaattcctttacatcagcagccagttgtgggtttcccgttacaatgccatctatggtagttttgccgcccttccgatgtttctgctatggttgcaggtatcctggaccatctgcctattcggtgccgaactgacctacgccggacagaatatccggaacttcagcttcgacaaggatgcgcgcaatatcagccggcgctaccgcgattttatctccatcctgataatgtctctcatagccaagcgctttgaacaagacgcccagccctatacagccgaagagatatccgaagagtgccagattcccatccggctgacacacgaaaccctttatgaattgcaggaaatcaacctcctacatgaagtggtgaccgatgaaaagagtgaagacatcgcttaccagccttccatggatatcaacaaaatgaatgtggccctcctactggacaaactggacacgcacggctcagaagatttcaaaattgataaggaaaatgaattcaacaaccaatggggagcattgctgaaggcacgggaggaatactacaagaatgcaagcaaggtgctgctaaaggatttgtaagcacgcggaagtctttccagaaactccgtatctgctttctttttgattattttttagacgcggatgacgcggatgggaatattaaaaaaatccgcgtcatctgcgtcatctgtgtctaaaaagtaaatcaccgatatttctcaggctccacggcacgagtcatatcataggcacggtcactctgacgggatgccactaattgcaggaaatcgtccatagtgccgttaccttatttatattgtatcatgcggctgatgtacttaccaatgatatcgaactccagattcaccacactgcccactttgaaagcatggaaattggtatgctcaaaggtgtaaggaataatggccacctggaaagtatcgtcggtgggattgcacacggtcaggctgacaccattgaccgttaccgagcctttgtctaccgtgatgtagccgcgctttgccatctccttgtcaaaagcataccggaaagtaaagtaatagcttccttccgcatcctttatatcgatgcaagtggcagtctggtccacatgtccttgaacgatatggccatccagccggccgttcatcatcatactacgctccacattcacttcatctcccacctgcaacaagccaagattggaacggtccagcgtttccttcatggccgtcacggtataggtatcatctgtcagactgactactgtaaggcaaacaccgttgtgagacacactttggtctatttttaattcactgacgaatgaacacttgaaagtaaaatgtacattctcctggtctttgaccatcgccaccaatgtggcacattcttctactattccggaaaacatggttctatatacttttaggttatacgcgatttattattaatatgcgcaaagatacaaaaagcccttcgtataggtacaaaaaaaaggaagcttttcacaaagcctcctttttcagttttcaataggtattagtttttttttaaggtaaaaagattgttttcaggataacgatgcaaatataggcgcttttcgtgatactaaccaaattaaaaaacatgtcttataacatctttttgagaaatcatttaagtttattatcatttcaaagcatttttctacacctgcaatcgttttcaatggacaaatataaggctattttccatgaaacactgaaattatcctaaaattttgtttatttcttatcatttaagtagtgttcatctgtccgcccgctatgttttaacacttttgcgtcgataaagaacactatttcttcggcaatattcgtgatatggtcaccggaacgctccaacttgcggaacacgctcaccaggttcagacaagaaagtgcactctccggatgccggctgatgtagtcggcaaggatggcagtggcatcagcattgatttcgtccagcatattgtccttggcaaacacagcggtagccaattcctggctctcctcctgaagtgcctgcttggcaagctcgagcatggagagcacctgggctatcatctcttcgagacggagttgcttgaccagctcagtatccaatgccggttcatggcagttgagggcaaagcgggcgatgccttctgcaaagtctcccagacgctccaggttcgtattgattttgagcatggcaagcacaaagcgcaggtcgatggcaacggggttgtaaagggcaatgatatcctccacgtcgctgtctattttcagttcgaaagcattgacgcgacgttcgcgcaccaatacctgctgggccagttcccggtccagcgtaagcacggcgtcacctgcacggtcgagctgattatataccagggtccacatttcgtctatttcctttttcagcaagacgagttcagattcgataaacttcaccataatgtttctattttaagattacttttgtacaacttatttttgcttgtatggaacaatccgctacccgaaacgtcccgtgatgtagttctgcgtctccaccttatcgggattcgtaaatatcttccgggtatctccaaactccaccatctgccccatatagaagaaagccgtattatcactgacacgcgctgcctgctgcatgttgtgggtgacgatgacgatggtgtactgcttcttcaactcgtggataagctcttccaccttggcagtggagatggggtcgagggcggatgccggctcatccatcagcaggactgaaggagacaccgccatggcacgggctatgcagagacgttgctgctgaccgccggagagggcgtaggcggagactttcagcttgtccttcacctcgtcccaaagagcggcgcctttcagggtttcttccacccgctgacggatgaaggcgttatcggtgatgccattcacacggagtccgtaggcaacgttctcgaagatgctttttgggaaaggattggggcgctggaacaccatgcccacgttcttgcggagttcatccacttgcactccttttccatagatgtcttgtccgtcaatgcgtatctcgccggtcagacgggtgtcgggaatcaaatcgttcatgcggttcagcaggcgcaggaaggtagactttccacagcccgaggggccgatgaaggctatcacagacttctcctcaatgtccatgctgatgcctttcagggcatggaaatcgccataccagaaattcacgtcacgggtttctatcttgttcttcatacctattgtatatgttttcaattcgtcttaatcttcttctcaaagtatttccgcagggcgtttgccagcaggttcaccaggaggataatgagtatcagcactagtgccgtgccgtaggcgatgggaagctgcgcttccatatccgtaccgctggtagagatgacatagaggtgataaggaagcgccatgcactggtcgaagatacttgtaggcagctgtggcaggaagtaggcggcacaggtgaaaaggatgggtgccgtctcgcccgaaacacgccccagcgccagaatcagtccagtaatgatattgggcatccccatcggcaggatgacatgccagatggtctgaagcttggtagctcccaacgcgcggcttccctcacgcatgctgtcggggatggctttcagcgcttcttccgtggtgcggataaccaaaggcagacttagcagacccagcgtcaacgaacctgccaggatgctgtctccaaaatccatatagttgacaaacagcgccatgccaaacagaccgaacacgatggaagggatgccgctcagattattcgtcatcatccgtatgaagcgtaccacccagcctttcggcacatactcattcatataaataccgctcatcactcccaccggaaaggcaaataaagcactgcccgccatcaagcagaacgtacctacaatggcaggaaggattccgccggcagtcataccgttggtaggagccgtagtgaggaactcccaatcgatgactcctatacctttatatataatgaagccgaggattgcaaaaagaatccccaccacacttaggctcaacagacggaacaagccgaatgccacgttttgcgaaagatgctttctattgaccatatctaccttcttttattttcgtcttggcgaaactgcttccaccgtgaagtttatcaataaactgatgaagaacagcacgacacccagcaggaacaatgcttcgtagtgaggtccgccggcaggtgcctcgcccagctccgcggcaatcgtagccggaatagtacgcaacggctccagaatggtatggggaatgacggcagcattgcccgtcaccatcagcacagccatcgtctcgcccaccgcacggccgatgcccaacaccactccggaggtgatgcccgaaatggagtaaggaatcaccaccttatatatagtctgccattgcgacgctcccagtgccagactggcttcgcgcatggcacgagggcagtttctcatcgcatcttccgtcaccgtaatgatggtgggcagtgccataatggcaagcacaatactgcccgccagcccactctcgccgaccggcaagtcgaagacctgctgcaaaaaaggcacaatgacaatcaaaccgaaaaagccgtaaaccaccgacggtatgccactcagcaactcaatgataggtttcagcagattccttacccgggaattggctacctccgacatatagattgccaccgacagaccaaacggcagtgcaaaaaggatggcaaacagactgacccacaacgtccccgtaatgagcggcaaaaagccgaactgtgcagcaggtgttgccgtgggaaaccattcggcaccggcaaagacgtccttcaccgaaatggtgttgtctttcagcaaatgcactgagtccggacgaacgatgaactgctgcggtacaaaggctataatagcgggcgtacgctccaccagctccgtaatgcaagcacctgcattttcataggaagcgcccaactgctcttccgtataatactgtgtgatgtcctccaaacggaaaaggcggataggaaggtcctcccctcccacttcgttccagtttgtcagctcttcatcaaagacatcctttatctgtgccggagtcagttcgcccacccgattctccttattcaaagccaatacatacccttcttctatcaccttgctgctgaacaagcctagcgcttcggaaaagaggaacacgacgataagtacgatggtaaggctcgtcacaaagccgctacaagccagtataccttctacaatcttctcaaaaatctttttcatgttgcctattgatttctgtatgcaaaggaacgggccggatgttaaggcagtgtgactaacgtttgaaagaaatatttcaaaggtgttacaaaactgttacaacggcccaaagcacattccatgtaacacatttgtaatatccattaccttaatttgcatcatgtgtttacccaatttgcaccatgtgttttatgaagacaagaaaattactcctactcctcgccctggcagctgccaccaccggcatgcaggcgcaacgcatcaaaggcagcgacaccgtgctccccatagcgcagcagaccgccgaacgctttatgaccctaaacccgtctgcccgcgtcaccgtgaccggtggtggaacaggtgtcggtatttcagccctgctggaccaaaccacggacatcgccatggcttcacgcgccatcaagttcagcgaaaagatgaaagtcaaagctgccggagaagacttggcagaagttcccatcgcctacgacgcccttgccgtagtggttcacccctccaacccggtgaaacaactgacccggcagcaactggaagacatcttccggggcaaaatcaccaactggcagcaagtgggcggagacgaccgcaaaatcgtagtctactcccgcgagacttcctccggtacctacgagttcttcaaggaaagtgtactgaaaaacaagaactacatgagcagcagtctctccatgcctgccacgggagccattatccaatccgtcagccagacacgcggtgccatcggatatgtgggcctagcctatgtatcgccgcgtatcaagacactcgccgtttcatacgacgggcagcattatgccgctcccacactggagaatgccaccaataagacttatccgatagtgcgcccgctatactattattataaccggaaaaacgcctcggtcgtagcccctctgctcgatttcatcttgtctgccgcaggacagaaaatcatcaaagagagcggatatatcccggtacataaagaataaatcttcattcttcattcttcattcttcatttttttaccctatctttgtccccacgatacgaaaatagtaacattatggcagaaataaagagcgaagaaacaagcgaaaaaaagagcttgaacttcattgagcaaatagtagaaaacgatttgaaagagggtaaaaacgggggaaaagtacagacacgcttcccgcccgaaccgaacggttacctccacatcggacacgccaaggccatctgccttgatttcggtattgccgccgcacacggcggtgtctgcaacctgcgtttcgatgacaccaatcccaccaaagaagatgtggaatacgtagaggccattaaggaagacatccaatggctgggctacaaatggggtaacgaatattacgcttccgactatttccagcaattgtgggacttcgctatccgcctcatcaaagagggcaaggcatacatcgacgaacagacttccgagcagattgccgcccagaaaggcacccccacccagcccggtgtggaaagcccttaccgcaaccgccccattgaagagacactggatttattccagaagatgaacagcggcgagattgaggaaggtgccatggtgctccgtgccaagatagacatggcaagccccaacatgcacttccgcgaccccatcatctaccgtgtagtgaagcatccgcaccatcgcacgggtaccacttggaaggcttatccgatgtacgacttcgcccacggacaaagcgacttcttcgaaggcgtgacacactcgctctgcacactggagtttgtgccccaccgtccgctctacgacctcttcgtggactgggtgaaggaaggcaaagacctcgacgataaccgcccccatcagtatgagttcaacaaactgaacctcagctatacgctgatgagcaagcgcaacctgctgatgctggtcaaggaaggcttggtaaacggttgggacgacccccgtatgccgaccatctgcggttttcgccgtcgcggttactctccggagtccatccataagttcatcgacaagattggctataccacatacgacgcccttaatgaattcgccctgctggaaagcgccgtgcgcgaggacctgaacgaccgcgccacccgcgtatccgccgtattgaaccccgtgaagctcatcatcaccaactatcccgaaggacaagtggaagagatggaagccgtcaacaaccccgaacatcccgaagaaggcaaccacgtcatcgaattcagccgcgaactttggatggagcgcgacgacttcatggaagatgctccgaagaaatatttccgcatgacaccgggacaagaggtacgtctgaagaacgcgtacatcgtgaagtgcaccggctgcaagaagaacgacgccggtgaaatcaccgaagtatattgcgaatacgaccccgataccaagagcggtctacccggagccaaccgtaaggtgaaaggcaccatccattgggtaagttgtgcccactgcctcgaagcagaagtgcgcctctacgaccgtctgtggaaagtggagaacccgcgcgacgagcttgccgccatccgcgaagcgaagaactgcgacgcactgacagccatgaaagaaatgatcaaccccgactccctgaatgtgctgccctgctgctacatcgagaagtacgctgccggcatgcagcccctctcctacctgcagttccaacgtatcggttattttaatgttgacaaagattctacgccagaaaaaatggtattcaaccgtactgtaggtctgaaagacgtttggggtaaaatcaataaataagaatatgagtaaaaaaaacctgctgtccggaagagacaaagaactgcaagaaatggcagaacaatatgaagctgccaaagcagagaacagaagcatctatctggacgcagacgacttagccgacctcgcagactggtatgccgtgcatcataaatatgccatggctaccgaggtcgtagagtatggcttgggaatacatccgaataatacagccctgctggtggaacaggcatacttgttcctcgacacccagcataaagagcaagccaaggatatattggaacggattgccgaagaatcttccgaagtgaaagtgctgaaagccaacctactgttgggcgaaggcaaagaagaagaagcggaagcgatactcgatagtatagacgataaggacgacctagccaacatcgtcgatgtatcctatatgtacatagacatgggattcccggaaaaagcattgacatggctgacgcgcggactcgaaaaatatgccgaagaagaagcctaccttgccgtcactggcgattgttactacgcccagggactgtttgaaaaagccaccttcttcttcaataagctgattgacaagaatccgtattcagctccttactggtttggactggcccgttgctactttgaccagcagatgttcgacaaagcaatcgaagcatgcgactatgccacggtggccgatgacgagtttgccgatgcctacctgatgaaaggacattccttcttccaattgggaaatgaggaaagtgccatggagaactacctgcaggccgaaaaattccatcttgtctcccacggtttcatcaacaccttcatcggcctgaacaaagcctccaaaggagagtggaaagaaggatacgactatctggaaaaagccataacagccgaagacagccatgacttcgccttgccctccctttatgccaatgcggccctatgcctgcacaagatgggaaagaagcgcaaagcccaccaatattgtaaaaaagcatacgacctgtcacccgaagagatagacccgtacctgattgagggacgcatctacatggaagaaggtgagtatgagaaaggtgtgaaaaaatgggccaaagccttagagtatgccccctatgcggatacctggcacgaaataggcatgtgtagcatggagataggacaactaagctatgccaagctggcctttgaacatgtcaaagagatggaaccggactttgaaggtatcaacgaaaggctgacctctctgtatatgctgctcaaagacaaagagaacttcatgaagtacaaccagctgtgcgaacatccgttcaggctggaagagctggacaaattgcaacagatactacaagaagataatcaggaagagctggccctagtaatgaagaatattttcaatgcattacaataacagtaattatataccactaatctagcaaatggaatcagtagcctttatccaatggtgtctcgaccacctcaattactggaccatcactttattgatggccattgaaagttcgtttattcccttcccttcggaagttgtagtccctcctgccgcttggaaagccgccaacaatgacaacatgaatatatatctggtggtattgtttgcaaccataggggcaaatatcggagcattgataaactactatctggcaaaatggctgggacgccccatcatttacaagtttgccaacagccgtttcgggcacatgtgcctcatcgacgaagccaaagtgcagcatgcggaagaatattttgacaagcatggagccgtatcaacctttgtcggccgcctgatacctgctgttcgccagttgatatccatccctgccggtctggcacgcatgaaactgggaactttcttgctgtacactaccttgggtgcgggcctttggaattccatcttggctttcatcggatattacttgtccacagtacccggcatcgagaacgaggaacagctgcttgccaaagtaacggaatacagccatgagataggttatgtatttatcggcatcggtgtactcatcgtggcattcttcatctataaaggaatgaagaagaaataaaaaagaaaacggcatgataataaaaaagcggtggacagcatgataaattctgtccaccgctttttattgcttagcccaaacccaaactttctactttacggctgcaatagctttatcatagtctggttcttgcgtaatttcaggtaccaattccgtataggcaatctttccatccttaccgataaccactaccgaacgcgccagcaaaccggcaagcggtccgtctgccatgcgtaccccgtagttttcatcaaaatcggaaaaacggaaatcagacaaaggaatcacattctcaataccctccgttgtacagaaacgtgcatgtgcaaaaggcaaatccttggagattgccaacactaccgtatcgggcaggccggcagccagtttgttgaacttacgtacagaagtagcgcacacaccagtgtcaaggctggggaaaatattcaaaataacattcttcccgttcagttccttcaaagagaatgaagacaaatctgtttttaccaattcgaaatcgggggcaacagagcccacctttataaattcaccgataacctttaccggttgtcctttaaattttgttgtagccatagttttatcaaattatatgtatacataacaaattacatacagaaaaagttcacccgaaacttttttccagataaactgttattctacggacgaattaatgataatcacttaaaaaattaaattcacatgaaaactatttttgacgaacttcagcaggaagtaaagaattggtggatttcactcattcttggtattctttatgtaatagtggctataagcctgatgttctcccctctcagcgggtatgcggtattgagcattctgttcagcgtctccatgttgttcagcggtctgctggaaatatcctttgcagtaagtaaccgtagaagggtatccagttggggatggtatctggctggaggcatcatcgacatgattctgggattctacctgatagcctatccgatgctcagcatggaagtcattccgttcatcatcgccttctggctgatgttccgcggcttctcatccgtaggctatgccatggacctcaaaagatatgggacaagagactggggatggtacgttgctttcggtattcttgccgtcatctgctcgctcatcatcttgttgcaaccggcagtaggcgccctttacgccgtgtacatgatttcgtttgcattcctgattataggtttcttccgtatcatgctgtcattcgagctgaaaaacctgcacaagcgcgggaaagagtggaaggaaaagaaagaagtatcagccgaataagtagcccacacgaagcgtgtcaaaaggaatcccacctttgacaccttcgtttagctgaattgctcaatagtgtctcagaaaacggaacatcgtagtccgtgacactcccatctgccgggcaagctcagcacacgactctcctctttggtgctcccttacaagcttcctcttgttcgcatagagtatcttcattttgggtgtgtcccctttcttcctgcccagatgttttccttctttcctccgtcgttccaaggcttctttggtgcgcatggaaatcagattacgctctatctcggccatcagtccaaaagcaaatcccagcactttgctattgatgtcattctggaacacatacccctctttggtactgtacagcaccactccccttttgatgcaggagttaagaatggtcattatctccagcagtgtccggctaagccgtgaaatctccgttataatcaaggagtctcccggtttcatccggtccaacaagcccgccagtttacgctctttgctactcacttttccgctgaccgtctccatgtaccatctgtcgatgctcaacccattcttttccgcgaagcgtataatttcctcgcgctgattctctaaaaactgtttttctgtacttactcttaaataagctactactgccataattgataaacgtttattggttattattcaccgccaaagaacggttattcaaataagagtggcaacacacaactatggctctctatcaaagaagatcacattatggatatcccccgaagtcagagaagattctcggtacccatctcaaatatgcctataaacaaagaaaacagccccactgaagctgttttctgaaattagttcataaaaaattgatactatgtagatttcatagtatactctccttcatttcattcactatgtatctcacatcctcatccgtcacataaggaccactcggcaagcaaagaccacgcctgaacaaaccctcactgacaccattcacataggcaggattagctgcataaaccggctggagatgcataggcttccataagggacggctctcgataccggctctgtccaagcaaatacgcatggcttccacattacggttgggctcacaagaggtatgggcactcattgactcatgcgtaacacccgcggcaccaccaacggcacctttcactgtctcacggtaggcatcctcctcacctctcacatgcagattcccgtcaagcagtaccgtgttcagccaataattgctgtcataacgtccggaaggattctcatgaagcgtgattccctccacatcggccaacaacttacgatacagaccgcacagatgcttatggtgcgctatgtgctcatccaccaccgtcatctgaccgcggccgattcccgcacaaatgttactcatcctataattatagcctatacgctcatgctggtagtagggataggactcacgggcctgggtagcatagaacattatctcacgcttggactcttcatcagggcaaatcaaagcaccgccaccgctggtggttatcatcttgttgccattgaaagaaagcacaccatatttgccaaaagttccgaggacttgcctgtcaaacttgcttccaaagccttcggcggcatcctctatgaccggaataccatatttatctgccactaacatgatttggtctatcctgtagggcattccatacaaagctaccggaacaattgctttaggtttccgcccgttcttgtcgatacggtccctgatagcctgctccagaagtaccgggtccatattccatgtatcagcctcagaatccacgaataccggagtggcaccgaggtaggtcaccggatgggaagaggcacaaaaggtaaagctttgtactatcacttcgtcaccctgaccaactccgcaagcgagcagggccagatgcacagcagcagtaccggcacttaaagccactacctttttattcagcccaacaaagcgttccaaatcctgctcgaaggcattcacattcgggccaagcggaaccacccagttggtatcaaaggcttcttgtatgaagcccatctccttgccgctcatgtgggcgaggcaaagataaattcttttatccatttctttgtaaaataaatcaagttcattcgacagaagaagaactcttccgcctcacataataggggataaataaccaataaaacagcctataaatatacttccggctgaaagttctcataattctcaccatgaccgggacataaacgacaccccttcgataaagaaagaatacgttgtcgggatagttctgcggacattttattgctgttaggaaatgaagcggacacttttacccctggtataaacgcatcacctgtaaacaaacaattgccaaatttgtaagtcaaacaacttctatcatgaccgggagtctcataaacttctactccagcacttccatataaatatacagtatccccttctttcagttctttcatgacactataatgttgaaatacataaggacacaaactatagcgcgataaattcaatttatcggagtacaatccttcctttccaaaagcagagatatagatgggagtttccggatattcatcaatgatggagtccaagccatatatatgatcaaaatgggaatgagtaatgaaaatacctttcaaaggtaatccccgattgcttatgttctcaattatagggataggatctccacaatcaatcaaaaaacataggccataattcctgcttattgccaaataagtatttgattcaaatacagaattgacaatccgaacaatctcaatcatttccactttacccgtcaacaaagaggaccgctcaaggtattccatctgaccaatctatcaatcagaaacagtccatcccacggcatttcaaagttcaacatcctgcctatcaaagggcatcgggcaacacctgccattgtagccttatttgcaaaatcaatggccttatcttcaggagcagcaataccaatcgtctggatataatcctgaacatgtactaatgcatcatttatgtgatccaccggatgtatcataagcacacgtgaatacactggcttacaaagctcattatcctctgaataaagtactgtccatgacatcgtatcacttccccaaactctacctttaaaatcatatactcccctggacgaatgaacagcagatatctgttccggagacatgaatggtttaggaatttgggcttccgttttgggaaatgcctccgctaaaatttcacagaaacgctcaggggtaactattcctcctttctcaatataaagattatgaggtgatgcacaaccggactggtcaaaaacagatacatctaccgacacccgtcttgccaatttcttcgcagcatgctccgatgacagttcctccctagcaattaccgcataagacaatttggggccgaaaacaactgtttcacagtcaatcatcgaaggatactttgccactgtctcaaccgcctctttccctccccatgcaattctgacctgggcagacccggacatcaactctcccattttttttgcatctctcgagaaatatacaacagccacagtatccatcagagccgaaccttcaagtgtatagccatcctcagttgtataagtaactccttcaaacgcattcaaaagcgcacggaacacaccgtcatccttggcagagacctttaataagttcacatttttagttatgatacattggaccaaggcaaacacacctaatatttgtacattgcctgccatccaatgacaagccagtcctcgcgaatttgccttcaagaaatgttttgaagaatttggaaaatgcaagaaggtatcgcaataccttatattccccctcagaccctcttcggctatctgccttaaatgagacgcttcacaccaattcgacaagaacagcaagcctttgtccttcaaaaaggaaaaacgttcatcggacagccatttctttgcgacttcaccaatgatgccaatcagtgcctcgaccggttgctgccggagccagtccagtttatcattcagacaagaaataataccctgcagctgctcctctcccgtattccctttcaaagttcccctgaaatattgaatgtccagatgagagtccgactttatttccgtcccttctttccgttgaaacaccaacttggaggaaagaatatccccacatcctctgacctccgctttcttcaaccgtccgacaatacggaacctctgtcccggacgtccataaggacaaggcgaatcttccagaatgccgatatcatctgtcaatactacattgcccggataagaatgaggaataggagttataaattcaagcatcccttcctttcccgccggaaggacacttcttgtaacggtatcgcgggccaggactttcacataagaagaggcatgcttacagccacaggcacaatccggataattcaaccccatctgctctgtaaatccataaatgtcgatgacatcttccggacaaatgccaaagcaccgcgctaattgctcattaaaaagttctttacttattttctcactttccaattttttccaaccgccaatatggattatcttggaacctttaggcaaatgcagtctcacatctgattccagtattgacttcaatacatgttgatacaatatataagtgaatccaaaaaccacaacaggctgtccggatggcaattcttttataaatgcctgaatgccttccacatcaaaatatgagagaccgttctcatccgctttcaggaaataaccgactttactcgcaaatttaagatacccggtcaccgcggcaaatctcgctccaagcaattttctggaggcagaacggggatcaatatccataatcaggaaaggtttcctctctttgccaatgaattcactgaccacctttaccattgctttaccttgtctttttgctgttatcttatcaatgactacggtactcggtattcctgaagtggcagaggactgtaatgccaaagtcagctcttcccggggaactgaattcaagttgaatcccaattccttgaatacactgacggccacaggcggaagttcatccaccgaatgaatcggctcatgagggttaaagttcttcctctcacaaaaatgccgatacatctcattgtgctcatagtggaaaacaagctcatcacgcagagcttctataaacaaattatcacattcttcactcccgtcataaggaggtctgttcaacagttcttcaaccatgcttcgttcattcataatcatttcaataataaccgttgtatcttgcccgatgttgttcgggggatactatcaatatgttccagatagaccggtatcttataattctccaccaaagccgccatctctttccggaccctttcatcatcctcttccgccaagcagccaacgatgaaagccttcacgacttctcccatcacatcatcatgcacaccgatgcatgcagactcctcaatacccggaatggagttcaaggcctcttcgacctcaatcggactgacttttttcccgccgacattgataatctcctttttacggcttttcaggtatatatagccggagtgatcaatgtagccccaatctccggttttgaaatagccgttataaaaatcattcctgaagatatcttctgatactccccaatagccagcacacacatgtccgccttttacgcacaactcgccctcctgccctgccgcaagtaaatttccttgttcatcacaaacgacaatctccgtaccgggagaagacttgcccactgaatccaaatgttccatatcggtatggaaatcgataaaagcgcttctcgaagcttcggtcaacccataatgcatacatatcttggtatcaggcaacagacgcatcaatctctctttctctgttttcggcataaatgcactgcctatctctatatacctcaattgggaggcatatcgggcaatcctatccacactcatcttggcaatataggcccagctggcaggcaccataccaaaccccgtgaccctgcatctttctatctctccgaaaaatctcttcatgctggcaaagctacccaagaggactagagtggcgcctttagccagtacacatctcagccggcccaagccgaaagaatgactgataggcaaagccagcaattcaacatcttcggaagtattccctatgaaagtatttatattatttgcagcggacaattggttggagtaggacaaaaccacccctttgggcataccggtggtaccggtagtaaacagaaggtcggcaatatccctctcttgaggaaaaaccacatcaaaatccttatcggatcctatctctgtgaacggaagcacctcatgtccccctttattgcgtagctcgccaataatcatggaaggtgctgcacaatcaatgatcctttccagacgggtcacattggtctccggatcaattggaacacaagtacaccctgccagatgcgctccaaaatagacataaatgaaatctatatttttacttgcagagacaatgatccggtcaccctttcccactcccttagaaataaaataagcagccgtatgctttatattgttccacaaggcacgataagagacagtcacttctcccgaaatgacggccgtcttttcgggagaagtgattgaatgccgatatatgatttcctctatcaccataattattacaacttttcctccacagctgctatgatatcatggacatcttccagatccatcatctcttccggctcaaaattgatatcaaaggcctcttctacattagaaaggattgtcaaatgtcccatagaatcccattggggaaaatcaccgattgtactattctcattaacattggacacttccgtttcacagacagaagctacaatctcaaatactttttcttttacgttcataatttatctatttataaatgacataatccgttctacgactttatcagttgataatccgttctgttccatcatataaggatagtcacccactatggaaaaactatccgaagctcctattttcagcaatttaggatgtgagttatattgtgataagtaatctgccaaggagtcgcccatacctccaaccatacggtgttcttcaagagaaacaatgaaaggcgcattaaaatctataacttcaatatccagaggtttgacagtatgcatatcgacaacagaagcagaaactcctttccctgctaaaatttcagctgcctgcatagcaatatacaccatacttccggtagctatgatctgcaaatccttcccctttcgcagagtgacagacttacccactttgaaatcaaaatcctcgtgatagacaatgggagttacagttcccccatacaagcgaatatatacggggctttccaactgtactgcagcctcaagagccttcattgcctccaatgcatcacaaggagctattactgtcataccgggaattgttttcatcaatgaaatatcctccaacgcatagtgggtatttcccattagtgtcaacgaaaatccggaaccaatccccacaagaacttgtcccgaatgcatataccccaagaattggcggacttgttcaaagcaacgcattgaaacaaaacaagcctgggctactgatattgttttatatccttcatccgtcaatccagctgccactccaatcatgttttgctcagcaattcctaagttgaaaaacttgtctggatacaaggatttgaatttatcaagtccggcaggtgttgacatatcagccgagagaacaatcacattatcctttttccgagccacatcgggcaatgtaataccaaacatacttccaccttgtcctaaagctgaataaatcttaggattaatcttactatttcccatcatacattgcttttatatcttctacagcttttttatatttcttcaatgacaacacgcaatgatgcgccatcttattattcatcagaaatgaaataccattcgcttttactgtatctgcgacaatcacccttgatacgtcagatggcttattcaaaacgcatagcaactcctctatagaatgcccatttacgacctccacttccaaaccaaacgacttaaacttttcttccaaagagtattggttcatgatttctttggtagaaccatctagttgatagccatttctatctacaatgattataagattattcagtttgaaatttgcaatagacatcaatgactcccatacgattccctcgtcacactctccatcacccaatagcacatagactttattactctggtgctttttctgcatagccaaagctactcctacagcataagatagccccaagccaagactacctcccgaaaattctattccataagttaaattccgatgtgggtgtccatgaaaagaggtaccattcttatcaaatgtggataaatctttctcacacagcaggcctttcttccacaaggccgtatagtaggccaaaacgcaatgtgccttactaatgattatccggtcccttttctcgtcaaatgtatcatccacataagctaccgaatagagcgctgcaaatatttccatggcagagaaagctccacctatatgagaaccgttaccgcccgtactcaaagccatttcaagagccttaagcttcatatcataacaatctttttccaggctaattattttattttcaatcatattctatactccccccgtaatttttataacttcaccgtcaatatatgacgaatcatcactagcaagaaatgaaacgactttagccacttcctccacagtgcccaatcttttcaatgatgtatcgttaaccagttgccccctcactttgctatcaacagaggtactcatatctgtatcaaaataccccggtgctacagcattcactcgaatcttggctgaagcaagttcttttgcccaacaagtagtcatgcttataagggctgctttactggctccatatacagtgttacccacggtcggtttcaaagctgcaatagatgccacattgattatagatgccgattttgagcgcaacatcaatttcacaattccttgtgtaatctgcaggggagcaaaataattcacttgcatcaccctatgggcatcttccatcttcaatcggagtaacccgtccgtattcaatataccggcattattcacaagtatatctatgacaatttttaaagagtatattttttttaaagcaatccgtatggcatcctcatcagacaagtcaaaatagataggatatatctgtattccatattctgattggcattgcctatagaaagcatcctgctcagctgtctgtttacgagtgcaagctataatattggctccaccgacaaccagctcttgcattattgccttgcctatacctcgattacaacccgtaatgagggcagtgcgtccttcaagtcttttcataattaatccaattcaatcagaggcaggcatataatatggtctagtttaatataagcactcccccaagacaaacctgaaccaaaaccacaaattacaacatcagcatcttctaaagataatttttcacctataccaacaaccattgtaataggtatagaagcactgcttgtattcccatattgcatcaaagagaaaggtattttgtcagctggtactttcaacttcttacctattttatcatccatatatttgttagcttgatgtaaaatcagataatcaatatcatccaatgagaaatcataatattccgtaagagatttaatactggctggaggttccttgatggaaaatccaaatacattcataccatcaagaacggattgagtacggttacgaataatcccgggttccacttcaatcattctcatagactcttctgttatcggatggcgcataccaccatcaagattaataattgcatcacctcttgagccatctgttgcaaaatggaataacatagggcttgctccttcattaaactctaaagcggtagctgtacctccatcaccatgcaaaggccatatggtcttatctaatggtgattgcaattgagaagttgtttctcctaccaataacaaccccttctttattccgccattctgcataagccctgcaatgacagacaaaccgtaaacatatccagaacatgctaaaggtacatctatcgcgtaacactctttagacaatccaagtttgtcctggaggagtgcagaagtatggggagtaagataatcacgagacaatgacacatatatcaatgccccaatatcctgcttattccattgaagcctttctatcaattgctctgctgcttcataacacaaatccgaacagcacatgccttttgggaccatcctggagcgctcaatatgcgttaatgctatcaccttatctgcctcgccaggagaaaaaaaactcaagtcttttatttctttgactatttttggaacagcagcagcaacccctgcaaactttacattagaaaatgataaaaatgccatatctcaatttataagtaattacaatgaatatccaccatctatttttaaacttgttcccgtaacccatgatgaagcatctgataataaataaataatcccccatgccacatcattgggtaatccataacgtttaagtggataattgctaatatctttttgtttttgttcctctgtaaaactatcaatatcattaataggagtatctaccattcctggatttacactgtttactcttatcccctttacagctaattctatggccgcattcttcatgaaaccatctattgcacttttagtcatggaatacattgcattaccaatatctaccgaataaacaccagaaatagaggaagtaaaaaccatagatgaaccacgtttcatctttttcttttttatgagaaattgtgtcagataaataggtgccaaagcattagtattcaaaatatgctgcaattcttcacgcttaataaaagcaataggttgtttaccaccaatacctgcattattcacacaaccatgtatttcaggcaattctttgacaaacatttctaatgcatcaacatctgtcagatcaagaattctcattatatgcccctctccttccagttgagaaaatgtctcttctaatcgttctttatttcttcccactaaaataagttttgcccccaaacgagagcactctactgcagtggcttttcctatgcccgaagaagctcctgtcaccaaaattgtcttgccagataaagaataaggattgtacatatcaagctctttttgatgctactcgattatataaatcttctatagttcttgaagctaaaatatcgtcccctttcaactgtacatcatattcttcatctgccatcgccattaccgataaagcaatcaatgatgaccactcgtccaactctttaaatacagtctcagcagtaaacacaatcttttcagtttcatcaaactgttctgcaaaatgctctataaaatcatttaagtccatgattaattattttattattaatatttaattaaagcagcaggattacccatatatgttgaattgtctttcgtagaacgaattataacacttccggcacctaccacagtattatttccaaccttctttttctgtaacacgatggaagaaacaccgaaatagttttcatttccaattgtagtctcgccagaaacacgtactcctggcataaaagaattataattacctattacagcatcatgtccaactataacatctccgttgaaagcgttgaaatcaccaattgttacatggcaacttatatggcaatcccaagaaaaaatatttcccttacctatctgcatatttttagaatcagcaaatcttaaattgggagcataaatattgggaaatataatattgtcattgtatatccctgaaacgatggaagctactccatgagggttaccaatggctattatcacattaagttgccgagaataagcatttagataatccattccacctaaaacccgaccatattcgttttcatcgccaacactttttgcatcatctatgaaacctacaaaattccaaacctgtttctttttatttatagcacaaagcaaacaagctatttcacgtccaaaaccgcctgcaccataaattactacatctttcatattcttaatttcaattatttccagtgaaggcttccatcgttactgaagtatttgaactaatatccttacgcaaaagcactttcctcattgttaaaaatattatcttcaaatcaagtaaaaatgaacaatggtccacataccaaacatctaattcaaactttttcatccaactgattgcattgcgcccattcacttgtgcccagccagtaatccccggacgtacttcatgccgacgggcctgctcttttgaatagagaggcaaatattccggcaataaaggtcttggaccaatcaatgccatatcccctttcaaaacattaatcaattgcggaagctcatcaagactagtggcacgaacaaatttacccacatgagtcaatcgtttagcatccggcaataatttgccttctacatcccgttcatccgtcatacttttaaactttatcacacggaatattcttccatcctttccaggacgctcctgagtaaagaatgctcctgcacctttattggcaaaatgcaaccaaatagtaataagtaataaaatgggccagataacaaccaatacaataaagaccagaatgaaatcaatcactcttttcaaaccatatttatacatactctcaaaaatgcttcattatagccttatagctcttatctacagtataattctcacacaaaaatctataccccctttctcccatctctttcattcgtttatcatcctctaccataaactcaatcatctccataaaggtatctatattcccattctctgtccacagaccaaaaccaccttcttcagctatccgtccgatgtccgtattcacatctgtagccattagcaccggcatactacattccaaatacgaaagtaggcgcgatgggaaattgggtatcgtaaaccgcctgtccaggaatatcaagcctacatcacacaagctcaccaattcatcatattttgctttcggcaatgcagcaagaaggcaggcgttttggggaaagtgcgtatcaaaccatgatttaaccctcatatactccgtaccactacctacaattacaaaatacgagtcatcccgtttgtcattctccttaatcactttcaataaaaaatctatcccctggggctttcccaaattacccccatagatgaaaatcctttttgatgcaggaatattcaattctttcagcagttcactctctttcctatctcctttcaacctttcccgaaactccacactattcggacagatttccacctttgccgtatcaatggcaggattatgcttcaacacatactcacagttggcaggtgacatacaaccgataaagtctgacaattcataaagtttttcttccttactcctgaacatcctataaagaaaacttttcttggagaacatacccaaatccaccgcattctgcggaaaaatatccttcagcatcagataagttttcgcattccagcgttttttcaaggttcggattaccttattgaaggtaatgggaggagtggaataaagaataaggtcgaacttcacatcccgccagtatttattaatggcatgcagatactggctttccaacaataaagtgccaatccccttctccacaatattcgttttctggatattgagtgtctttaccttcaatattcttgcaccaccgttctccatgactccggtaggctgatggaatctccgctcataaggggatactatatacatggcatgcccgttccttataaattcacgcatcaggtccgtatagatgccacgctcttccaagccattgatacgggatattgtcaaaaaaagaatgttcatcccagcagtcagaattttctccagaccatcttgttcaccacccccgtatagctctgaatcaacttcacaaccttagtcgatacattctcatccgtataattgggcaccggcagaccatcgtcctcattcctattcatctccacagcagtatctacagcctgaagcaaggatttcccatcaataccggcaaggacaaagatacccttgtcaagagcctcgggacgctccgtactcgtacggatgcatacagcagggaaaggatgccccacagaagtgaagaaactgctctcctcaggcagggtaccgctgtcactcacaacggcataggcgttcatctgcaggcagttgtagtcgtggaaaccgagaggttcatgctgaatcacacgtctgtcaagtgcaaagccacttgattccagacgtttcctgctacggggatgacaactgtaaagtatgggcatgtcatatttctcggccatagcgttaaccgccttgaaaagggacaggaagttcttctccgtgtcaatgttctcttcccgatgcgcggaaagcaggatgtatttacctttctggagatgcaatctctggtgaatatcgctggactctatttcggacaaattctcatgcaggacttccgccatgggcgaaccggttacgtatgtacgttctttcgccacgcccgaagcgttcaggtatctgcgggcatgctccgaatagcagaggttcacatcggaaatgacgtccacaatacggcggttggtctcctcaggcaggcactcgtcaaagcagcggttgcctgcctccatatggaagatggggatatgcagacgtttcgcgcctatcacgctcaggcaggagttcgtgtctcccaacaccagcacagcatcaggtttcacctgcaccatcagcttgtagctggcgttgataatattccccatcgtggcaccgaggtcatcaccgacggcatccatatacacatcgggggctttcagcttcaggtcacggaagaagacaccgttcaggttatagtcgtaattctggccggtgtgggccagaagacagtcaaaataactgcggcatttgttgatgacagccgccaggcggatgatttccggacgggtgcccactataatcagaagtttcagtctgccgttctcctgaaacctgacttgcgaataatccaattttatatccatctgttcctatattctttaactcgtttcaaactttttcaaaataagtgtccggacgtgccgggtcgaaacactcgttgcaccacatgaaggtcaccaggtcttccgtttccgaaaggttgacaatgttgtgcgtatagccgggaatcatctccacgacctccatcctcccgccgcttacctcgaagctgacaacctcctccgtacctatcttgcggagctgtatcagaccgtgtccgctcaccaccacaaacttctcgttcttggtatggtgccagtgctggcctttcgtaacgcccggcttggagatgttcaccgagaactgcccgcagtcggaagtacggataatctctgtaaaactgccgcggtcgtccacattcatcttcaggggatagctgaaccgttcttcaggcaggtatgagaggtatgtggaatagagtttctttgtaaaggcatcgctcaaatccgggacggacaaggtaccgggcatttgcctgaaagaccttatcagttccacaatgccgcccaaggtaatggtatgtactacgggtacttcgcaataatccccgttgcggtgttccatgccgctcagggcagagataagctcgtccaccacatcgtctatgtaaaccagatgcatcaccaccgaagggtcgttcacccggatgggcaagtcatgggcgatgttgttgcagaaagtggccaccgcgctgttatagttggggcggcaccatttgccgaaaacattcgggaagcggtacaccagtacctttgcacccgtttccctggagtactcgaacaacagttgctcccctgcccgtttcgattcaccgtaagggttgtcgagtgcggcctgcgtggaagaggaaatcattaccggacaggtattgccgtacttcttcaatgtatcaagcagcgtggaggcgaagccgaagttccctttcataaactcagacgtatccttgggacggttcacgcccgccagattgaagacaaagtcagcctgtttgcaatagacatccagttcggcagggtcactgtccatgtcatattcgtaaatggcaagttcctcacctgcaatgccgtaattacgggctttcccgtcacggatgttgtgcagctgggatacaaggttccggccgacaaaccctcgggcgccggttactaagattttcataaactaatgggattggataagatggaaaagttaacaatggctatactattcactcttgatttccgcgctcttcgccttttcctccattccgaggtcttcgcagatgaagcggagtttcaaaagaagctttttcatgccctccacatccaggcgggcggtgttatggctgtgatagtcctctatacgggcaatatcctcattgccttccgtgaagaacttgtcatagttcaggtcacgggtgtcgcaggggatgcggtagtagtcgcccatgtcgacagcctttgccatctcctcgcgggttaccagtgtctcatacagtttctcgccgtggcgcgtgccgatggtcttcacctccgtctcagcgtatttcggatcaacctgcgcgtatgtttccttcaaggcctgcgccagtacatccaaggtggcggcaggagccttctgcacgaacaggtcaccgttatgcccgtgctcaaacgcatagattaccagatccacggcatcgtccagcgtcatcatgaaacgggtcatgttggggtccgttaccgtaatgggcctgccgttctttatctgctccacccacaagggaattacagaaccgcggcttgccatcacattgccgtaacgggtacagcagatagttgtaccggcttcctcacccaacgcacggcccttggctatggcaaccttctccatcatggctttgctgatacccatggcattgatggggtaagccgccttgtcggtagaaagcactactacgtttttcaccccatgcgctatggctgattccagcacattgtccgtaccgatcacattggtctgcacagcctgcaacgggaagaactcgcagctgggaacctgcttcaaagcggcggcggaaaacacataatccactcccatcatggcaccgtccacagactggcggtcacggacattaccgatataaaatttcaccttgggattctgcaggtgatgacgcatgtcatcctgctttttctcgtcacggctgaaaatacgaatctctttgatatcactatcaagaaagcgacgaagaacagcattaccaaaggagcctgttccaccggtaataagtagtactttatttctaaatattgacatatttttaagtttaattttttctaacttacaattgaaaatttactaaattttataaatgtatttttttactaaatctgcattgtctttcaacaacaaaatctgacttttaatagaatctaatttagttcttttactcctatactccatatacccctttacgtaaggtactattgatttaggataaaatagtattaaaaaaagaggcatcacaaaattaacaacacaaagaaacacattccacaaaatgaaaatattcctaatatatttgtactgaatatagaaccggtttcgaaagattctttgctgataacttttagatttgtcaaaaagccgttttgcagcccctactgatgcagaaccaatatgccatgcgcgcgttgtaacaacacatttcgtatgccaccccatataggctaacagaaatctaaggtccgtatcctcccatcccgtttcaaacatttcatcaaaaaaagaaccagtcattttctgtacagataagattgtacttctccgatatataggaaaactaccagaaactccaaatgtatacccatctactattcccatgtcccccaattgcaaatgcaatttaattcctaaagcaccagatgaataagtagactgtaataacttaccattcttccaaggatattctactcccgccacacatcccaaagtgctgtcacaatcaagagctttgacacattcttctaaataattagaatcaagatagacatcagtattaagtagcagaacatattcaccttgcgcatgtgaaataccaatattcatacctcttgcaaaaccataattgagattgttttccacatatataaaagtaggatatgctttctttacttcttctaaagaaccgtttgaagaaccattatcaacaaaaatgacctcaaaatctttaaaactctgtgcacatattgctttcaaacaatctttcaaataattatcactattccaatttaatataactatactgactttaatcatattataaatcaattaaatagatgtttcaactcaaaaataaaatcctgatctaacttagtcaatatagaattatcatatttaaaatattctgtattgatagacttcactgctttagcgaatgattctggagtgacttcttctgaaaacaccacatattctgagacctttgattttttaatgcatgtcaaaggtgaagacactggtaacaaaccatttgacatatatgccaaaactttagatggaaaagtataatttgacattgagtcatctaaaaatctagtacaaatccctatatcacatttagcaagaaaagtagcatattcattaccagataaacaaccatcatatgatactatcttaaatcccatctgtctattaacctcctcaatcctacactccaaatcaagtattccatcttttgagccatatcccaaaatatgcatatagtacttatgagataagaaacgacacatatcaactgccatcaatgcatcctcatgaccgataactccagcatatagaagatgaattttaccatctcctaatgacgttttaggcatatccgctttggaatatataccatagcataccactcctttctgagaaaaccccgacagtttggaaattaaatcattaatcaatagatatcctgccgcatttcttagatattttttttctttttctattttcaattcaccattggaataaacagcattaaatagttcttctacttcaaaataaattttccggttactgaaaaaacggaaaactttaatgggaaatacataggctaatgaatggtaaattaaaacacaatcatcttgttttactttaaaaattaaataatgccataattggcaatacatccataaacgagacagcactttcaataatacattggaacgacaaaaagtagaaatgaattttagggtttctgccttatcaatcttaattgtgagagacttatatataaaaaagggatgttcaaaatctccttcagaaagagataatatattaactgtataacctgctttctttaaagctgattttatataatctattttagttacacctgaaggttgagtaataatccgcctgcccaaatctgactgtgtgtagctacaaagataatggagagtacacattcttttttgaatttaaagtaagatactgcgtatatagtaatatagctattaaaaaaaatttctgctcatttatgccaacatttatagtaaaaccaaataaaagaggtaacataaaagcatattctttccaggtcgtatgaaatcttttacgaaacataaataaaaacataatatatgcaacaaatccataggcatatattaaatacaaatgcccattatgtggtctccttaaaagaccatctatataaatattgctaccatttccccataaaacatattgaaatatgtttttattctccaaaaagtctatccaaattttagttctcgaatcggaggaatttgattcaaatctgtcaagtgcaagattcatatactcctccaaaaatgtaaagtcaacaaccaaaaacaaacagagtaccaggccgaataatgtcaatacaaaaaagagttttgtcaaagaaaaacgccttttaatattaaaaattaaaataagacaaaaagaagagatataacaaatccaagatccggaactcattattaatatcaagcaaaatacaataagcaaggacaatgtcaaaaaacggctaatcgaaaaagagatgttacaacataaaaatgtataaatagcaattattatatatccaatattattaggatcagaccacaagaaactatacctgtatatatacccagtactatcatctaaaatttccaataaagcatctttaggatttaaatattccttaatttcaataaacaaattaaaatcaaataaatataaagcacccaatacagcaacatataaaagaaaccccaacaaatattttttaatcgacacaatatatgtttcaaatatatgaataaagaaaaagaaaaaagacatattcataatgtattgaaacattcttttcacattttccgatataccattaaaaaaaagattcagggattgtataaattgatataaaggtacttacaattatcatatatgagaatatacgatatgcagagaaatcttttctattaaaaatattacgcttttgaagtaagaaccaaataaatattggtatttgcgaataagccatagccatcctactcatatatggcaaaaaaagaatatcaaaaacagaaaaatgaaatagaaatatctcaatttgagagatagaaaacttaaataccctatttaaatatttttctccaaatcttgtaacacacatatttaatcatatcaggaacatacattttcatccgtaatgtttcctttttaagtattgctaaactctgttttttatactcgtttttggtagtcaaataaaaaaagcctcctccttcatttgttaaaatattatattcaaatggaatatgaatagaagcaaaagaaattattggcttttttatagttttcgatgttatgacataattagtatcaatattgcatacatcttttgtagaatataaatcaaagcaaacatcatattctctgtcgtttagtatcagatttcgttttctcatttggaaaaaacaatcatatacataaatactgcttttatcaaaatcacgaaataaatattttttattaatcccaaagaataatgaagtagtacaaatattactttgatttgtatgatgaacaccagaagatccaaaatcgtttgtaaatgaaacatatggataaacaaaatatttatccaaatctatcatataagctatatagaacttcttccaagaatgagtccacaatttaactgacgcagggatattaatatcctcaagacttttattcaacgataaccaacttcgaaatgaatgccattgccgtttggtccataattgcccccaagaagatggccactgaataaaaaatgtatcataattatcttgaaaaggataaaactgataaaaacctatttccgtatatttataactaaagagagaaatacctgcaatattatcattattcaggtaataataagccgcttgctttgcataattataaaagtcttttgcaacatacaagtcatcctctaagactattacagcatcatattcatctactaaatctccgcaagaaagaatattctgttttagtccaatattactaggatgaagaattattttttttgatccaaattcccattgaaaactttcagctaaatatcgtatattatttattccagaataatcaattgaaaatatcaaatcaacctcttctccaagataattagcaccttctaatgatactaataatctatttaatgaatctactcgattgtagcaaggtattactattcctatattcatattatattatgcaatcaaattcatacaaactactcaacttcatctattaacgatagccatttcagatactttgttattacctttcaagagagtaaactccttatgagtatcagcaagcatcgaatagcgatatatatctacgagctacataacagcggtcttacatcataattacgaaattataactagcttttataatgattacccaaacaactgtactatattcctcaaattaaatcctctacaaaacaagatttatctctaaaacaaaaacaataatgtaagtaactaatattcaattatcaacctcctattttttttattctacaataaactctttgcattaaaataaaagcagaatctattttattagcaacaaaagggtttaaatacaaataaggccacataatgccataaaaaggttgttgatttacagtccttatatatttaacagaatatgatggtattaaattgaggtattcttttttctgcttatatgataaattcctagctgaaataatatcgcgcactaaattgattttctttaacagaaaataatatgttaaattcatatctttcaaataccctctactcaatatgtaatactccatcttatccaaaattccaatatactgaaccagcctttgttctttcattacttttctctgcatatcatacgttaccgaatgttgattatttacggtatagaaataggtcacttgagatgtttgacacaatatttttataggtttaaataattggaaagtaaaaaagacatcctcattaacatttgatggtatacattcaacctcccatgctctgagcatcgaaagtctatataacttattccacgtttgaacataaaaaccttttgcaaaaaagaatttaccaaaaacatcgttaccttgataacaaatgtccttcaatatattcttagcaattgattttccttctacatcacaataagaaaatgaaccaataacaatgtccgcatcattcttacaagccatatgatataatgataatatacaatctcttgaaagacaatcatcactatccatgaaaaacaagtattcacctttcgcttctctaattgcggaatttttagttgctccagtaccctgatttacaacatggtctattatgcgaacatctttcccccttggatgtgttgatacaatctcgctgacaatttccatactacggtctgtacccttatcatccactatcaaaaactcgatactatcaaaagtctgatttagagcagaaagtaatgcacgctctacatacttttccacattgtaaacgggcatagccaatgttaccttgtaattcatttattatattttttgattttcaaataagatagcaagtagctgaattctttaatacgaaaaacgaaactgaaaaagactagacatactgcaccaatcaaaagtccaccaaacaactgaatatatacatttgaaattatcaacaaaaaaagatgagttactacgcccactccaattgatacaaggaaaattggcaatatagcttgaaactgttgtcggaagccggtgttcataacctttttcgtaaaaactataataattcccatatcaagtatattataggataagattccgagacataggattttcaatcctaaaggcatagttagcaatagaattacgattgccacaatcttctttattatttcagctttcaaaaaatagtcggaacgtccccttacattcagcatctgattgtttatcaccattaccggataccacatataagcaatgcaaagtatggataacaattctgacatggatacccatttatcagtaagcagaaccaaaaccatcggttttgagagaactgccaatcccaccatcaatggaaaaattatatagcaagacattcgcagatactgaatgaacgaactacttaatcgctcttcatcatgctgcatttcacactgaattggataaatggctcttgtaatcacaccgacaatattcactgacggatattgagctaaagaatagctccgattataatatccaacatcagtcgcagagtatttacgaccaatcaccaaggtatataagttcaaataaatagtatgcagtaatcctgatagcagcaattttgatccaaaagagaacaatcctttaaaagactgccatgagaaaataaaagccggcatccatcttgcaaacacccatagcaatagtgtattcagcaaattattaagcaaactctgacaaaccaatgcccagactccataaccataataagccatggtaatgccacaaataccacttacaataacagcaataagtgatgccttagcctgtgtcttaaaattcaattgaatagtcagcttagcacgctggactattgataatgcagatataattatattaaggcctacccacttcgttattatatccagtagcggttctttataaaatagcgcaatataaggagcggagagaaacagtatcagatagactactaacgaaactacaatattaaaatagaacactgtggagaaatcgatttctgtcctatccttcttctgtatcagcgcattcgagaatccactttcgataaatgtctgggctatggccaaaaatattcccagcattgctatcagcccatactccgagggagctaccaaacgggcaatgataatactcagcacaaactgtatgccttgcacggagaaacgttccaccgcactccacaaaacaccccttacagcctggctttttaaagagtccgacatgaaacaaattactgcttacttgcttatttctccagcaaaatacgcaatcgtcttcttcaagccgtcttccagctttatctgcggttcccaaccatccagtttctcttttgccaaactgatatccggcttgcgttgcttcgggtcatcaccaggcaacggacaaaagacaattctggattgtgaatccgtcagttctatcaccttctcagcaagctccagcattgtgaattcacccgggttacccgtattcaccggaccgataaagctgtcatccgtcgccatcatacgcaccatcgcctcaatcaaatcatcgacgtattggaaacttctggtctgacggccgtcaccgtaaattgtaatatcctcgcctttcaaggcttggacaatgaaattcgataccacacgaccgtcattcggattcatacgtggaccgtaagtattgaatatccggattatcttgatgcgcacgccattctggcggtgataatccatgaatagggtttcagatgcacgcttaccttcatcgtagcaggaccgaatcccgataggattgacattaccccaataactttctacctgaggatgaatggcaggatcaccataaacctcgctcgtggatgcctgaagtattttggctttcgtacgttttgcaagccccagcatgttcatggctccataaatggaggtcttcatcgtctttataggattatactggtaatggggaggtgaagccggacaagccagattatagatctcatccacttcggcatgatagggagtggtgacgtcgtggcgtaccaattcgaaattatgatcatcgagcagatgacgaatgttgtccttactgcccgtaaaatagttgtcaaggcagattacgtcattgccttccgccaacaaacgttcacaaagatgggaaccgataaaacccgctccaccagttactaatactcttttcatttccaatacagataatcaggattacttttgaccgatgcgggaataaatgaaacccaactcttgcaattcctcgctgtcatagatgttacggccatctactacaatataattgttcattgctttatgaatgatggcccaactcggcatacggaactgtttccattccgtcagcaaagccacagcatccgcatctatcacagcttcatacatgtccttacaatatgtaaccgtatcgccgatacgccgtttgcactcggccattgcaactgggtcgaaagccttcactgtagcacccgcttccagcagtttttctataactaccaaagctggagcctcgcgcatatcatcagtctctggcttgaaggcaagtccccatacagcaaccgttttacctttcaaatttccattgaaagcagcattcagtttgtcgaacacaatactcttctgtttctcgttcacagtctccacggcttcaatcacctgcatgtgataaccgttctcaatgccggtatgtaccagggccttcacatccttgggaaagcaggaaccaccataaccacacccggcataaagaaagcggctaccgatacgggaatcagtccccatacccttacggacattgtctacattggctcctacacgttcgcaaagattcgctatatcgttcataaagctgatgcgcgtggcaagcatggcattcgccgcatatttggtcatttcagcagaggggacgtccatcatcagaatgggataaccgttcagcgtaaaaggacggtagagcctttccatcagtttacgggcgcgttcactctccacacctaccacaacacggtcaggagccatgaagtccttgatggcagccccttccttcaaaaattcaggattagaagcaacgtcaaactcgatgtttacaccccgtttgtccagttcttcctggatggcggtacgcactttcttggctgtacctaccggaaccgtactctttgttaccagaacaacatgtttattaatattgcgcccaatcgtgcgggctacctccagtacatatttcaaatcggcactaccatcttcatcgggaggagtacccactgcactgaacaccacttccactgcatctaggcaagtggttaaatccgtagtgaattgaagacgaccggcttttacattacgctctaccagttcatccagcccaggttcatagatgggcatgacaccatctttcaacttttgaattttcttctcgtcaatatcaacacaaataacattgattcccatctcagagaaacaggctcctgataccaggcctacataaccggtaccaacaattgcaatattcatatatttatagtgtaactaaattattccttgattttaaagagactgcgcaagctgtcttgtaaggggtctgaaacccagaacacattacgctgctccatattggtatctccataacctatgacagcagaggtatacatggggtaggaagttcccttgctacgattgtttttccaatggaaagcacggaggttcagcagattattccataaaatttctggaacgccaagctgcttcagtttaaagaccggatagatatggtctatctcccaaccgaaaatactttcatgattattgaattcattataggcaatccatgcaccgcaagcatcctgacggacacgggtagcatcatagccagaaataattcgtgcagactgccaaactatatcttttaagtcaccagacatatacaaattagaattgatattctttctttcatactttccattacttcgctaaaaatggaaagctaactaaacagttttctcgacaaaatattcaacagttcttcggagccatatattctcaaaaagaaaagtacaaatggtattacccacatttagacatcaatgattcacaaaaacaatatgctatctcaaacctacacatacacattagttaaaaatatttcacagcctacatttgttaatattttaaaattcactcaagatggaaagccacttatagatatatagtttttctatagctattattttctattccatcatctcaaacggacaaggattttcttcaatattattcaactcctctattatttccacttcttccacagtcaaggccgacttatcccaactagatataatggtatgagcctccttcagcaaggattcttcataaacttccccataagtataagacaataggcgtaccttaagcaaagaatctggaagttcttctaaaacattataaatacggtctaaaatcaactgctttttctgttctttatctccgtaatcataaatagtaatattataccccatcaatagagccagacacaaattcgcctcctcttcaacatcggaactctgagcagaaaaaagagaatcggacttaacaagcacttccttattcaaccggcaaaaagtgtcggaatagaccggctcaccgtccataccaagatacatcagctcatgagctgcatgctgaagctcaagagcacgggaagttaaatcattcattattatgatatatgattaaaatataagattacacctatttagaagtcacccgattattttcagataggatttggggactttgacacttgccgtcaaaagatctttaatacggataacgacgtatgttttattggcttcgatggcaacctcaccttcaataccgctgagttcgcctttgataacttttactttatgcccaacagtcagaatttcgctatcaaggctgacaccgtcaggattcaaatccattacgaacataaagtcctccatttgcttatctggtaccactagcatggaatgcgtggcaaggtccttcatataaaaaagggggacattatagatgttggatatatcgcaggctgtctgcttggtggaatgaacaaataccaaattgcggattaccggaacttcgctacgcttacgacgatacttcaattgagaaatgacaaagcgcgtgggaagataatagtcaagctccaaatgctcttccgatttaagtcggtccaaagatttccggactgtgaattcctgcttgtcacgggtgcgagccgcaaaccaatatttctgttgttcagtcacttagaaattttctttcgaatgaattagctcagttccgggtgcgcttcgcggtttgaacgagacattttcccacccaaaccgtattgtacacttttgcaatgataataagctattaaagaagatattagactcataaaagtgtccaataaacgttcgtttaatgaacgtctatttttaagaaaataagtagaggcataaaagttaaaaaggaacagaactttaatatgttaaatgttagacgtacactgctgcaattcaatagattaatatgaaacagaaatcactttggaaatatttttattaaacattttgttagttcaaaaaatacagcttatctttgcgttcattaaacgaacgtttaaaaaacacctcataatttccaatatatcattctacattccaacatctaaccctcataaatgcattattgaagtttcgtaaagatgcctgctaataaatgggaatttatcgcacaaaacgcaagtgaaataaaagcccacttctataatctatgaaaagagagtgaaagcccgtggatttctatctaaaacacaagcattcctttgcttttcaccctttgtttgtctactgttgcatagggaattaataacgcctaacggccatgaacagctctgcttatggccgtcaaacgattgcttcatggccataagcagaactgttcatggtcgttaggcgtcactaactccaaggcttttacagatgaagtacgtaacccacacctgttgcgcacaaggcgcaaacgtattgtacagtaacttaaaagacattagactccactattcatagtcaggcaaactcgaaaatgcaggaaaactacaccgaccgatttatgtaacccacgcgcggtattatggtagaggataataagttacggcaaaactcagacgttttcggcaggtggaagcaaattttgcttccaccttttcaggttgcttccaccgcagagtaaatgccgatggatagggagatgcaggaggtgggtggaagtgtggaagcaaagcagatgcaaatttatgtttcagcaacacacctcaagttttaaaaaagatgtagtacaaaggtataaaatataataagtgttacaaatacacactttatgccccgacactcttgcaaatgtcgaaaaagtccgtacatttgcaatgtgtttttcatagtattagatttaaggttaacaaaggttggagtacagcggtactcctttttttatgcccatacgtaccggcccggttctccaataaaattttcacgtaaaatgcaaggcaactttttatatccatttagtttttggctatctttgcactgctttcggcgggcataggcacgcataaagcagcttaactaacaataaatcaataattaaaaacagaaaattatggcaatgcatacatggtttgaatgtaagatccgttacgagaaaacaatggaaaatggaatgaacaagaaggtgaccgaaccgtacctggtggatgccctcagttttacggaagcggaagcacgcatcatcgaagagatgacgccgttcatttcgggagagttcaccgtatcggacatcaaacgtgccaactatagcgaattgttccccagcgaagaggaagctgccgaccgctggtttaaatgtaaactggttttcatcacactggacgagaaaagcggtgcggaaaagaaaacctctacccaggtattggtgcaggctgccgacctgcgtgatgcagtgaagaaactggatgagggcatgaaaggcacaatggccgactatcagatagcatctgtagcggaaaccgccattatggatgtatatccgtacagtgcagagcccgacgacaaaccggaagtttaatttgagtgatgagttataagttatgagttattattgcgacccataacttataactcataactcataactcaaaaaaacgatgattgcagagaatttaaaacaagtactgagcgaactgcctgaaaaggtacggctggtggctgtttccaaatttcaccccaacgaggcgatagaagaagcgtatcgtgccggccagcgtgtgttcggagaaagtaaggtgcaggaaatgactgccaaatacgaaagtctgcccaaagacatagaatggcatttcatcgggcatctgcaaacaaacaaaataaaatatatcgttccttacgtagcgctgattcatggcatagactcctacaagctgttggccgaagtgaacaagcaggctgccaaagccgaaaaaactgtcaactgcctgctgcagctgcacattgcccgggaagagaccaagtttggattcagctttgacgaatgccgggaaatgctggcagccggtgaatggagaaagctcaatcatatccggatatgcggattgatgggcatggccacgaatacggacaatgacgaacaaatcaaaactgagttttgttctttaagtagcttcttcaatgaagtgaaagccaagtggtttgccgatgcagagtcattccgggaactgtccatgggaatgtctcacgattaccacgaggccattgcagccgggagcaccttgatacgtgtaggaagcaagatttttggagaaagaaactattaaccataaaaaatcattatcatggcaacattagaaactacttttgcagggctgaaactcagaaaccccattatcgtcagcagctccggactgacagacagcgccgccaagaatcagaaactatctgaggctggcgcaggtgccattgtgctaaaatcactttttgaagagcaaatcatgatggaggctgactggatgggagacccgaacatgtaccccgaaggcagtgactaccttgtaggatatatccgcgaacataagctgggtgaatatctgaacctaattaaggaaagcaaaaaggtttgcaatatccccatcatagccagcatcaactgctatcagaatgccgactgggtggaatttgccgccaaaatagaagaagccggtgcagacgcattggaaatcaatatccttgcactgcagacggatgtacaatatgcttacggcagtttcgagcaacgccacatcgacattctgagccacatcaagaagacggtcaagatacccgtcatcatgaagctgggtgacaacctgaccaatccgatagctctgatagaccaactgtacgccaacggcgccgccgcagtagtgctgttcaaccgcttctaccagccggacatcaacattgagaaaatgatacaagtatccggcaacgtattcagcaacgaagccgatttgtctaaagccctgcgctggataggcatcgcttcggcagccgtaaacaagctggactatgccgcttccggtggtattcactcgcccgaaggcgttgtcaaggcaatattggcaggtgcttcggccgtagagatatgcagtgtactttatcagaattcagctaccatcattgaggagtatatccgtttcctcaacttgtggatggaccgcaaaggtatggaaaccatcagccagttcaaaggtattctgaacgtaaacgacccgaagggggtcaataccttcgaacgtacacagttcctgaaatacttctcttcacatgaatgagacaaaagactgacaagaagacaataaaattgaaagggtgataacactacaatgacgttatcaccctttcattttatactataccgctatctttttatttcttcttatccagcgcctcaaagcaggaattcttgcttacgaactccggaacaatatccttcatggcagcaacaattttcatctggtcataggtgtaacttacatcaatcagtttctgaatacgctccttcacctcgtcatagtcatactcacgcaccgtagcaatcataatcttctcatgataggtgggctttgtaagctccttcacattcaagagttcttcgtagagcttctcgccatgacggagaccggtaaattcaatcttcacatccgtacgtccagaaaggctgatcatacgcttggcaaggtccacaatcttcaccggcttacccatgtcgaagatgtagatttcaccgccgttgcccatactgccggcctcaagaacaaggcggcaagcttcgggaatggtcatgaagtaacggattatctcaggatgggtcaccgtcaccggaccgccacgctgaatctggtcacggaaacggggaatgacagaaccgttggaacccagcacattgccgaaacgcgtagtgatgaactgagtggcatggcctccctccttttgcaacttcttcgcaagagactgcacataaatctcgcagatacgcttggaacagcccatcacgtttgtagggttaacagccttgtccgtagaaatcatcacaaacttctcggcaccgtatttcacggctagatcggcaacggtgcgcgtaccgaatacgttcacctggatggactcggaaacgttgtcctccatcatcggcacatgcttgtaggcggccgcatggaaaatatactggggcttgaactccctgaagatatcctccatgcgcgtggcattggagatatcggctatgatggtctcagcatcgatgtcacgccaacggtcctgaagttccagacggatgtcgtgcagaggagtctcggcctggtccactaaaataagcttatagggattgaacgaagccacctggcgcatgatttcgctgccgatggagccggcggcgcccgtaatcatcacacgcttgccctccagatgagaggcaaccttatggatatctatctcgataggattgcgctgaagcaggtcctcaatctgaatttccttcaactgcgtgcggctcaatgcctggccgttccactcgctcaagggaggcgcggtcatcagtttgatgttgtgcaccagcaggcgatcagccatgtcggacttcttcagttcctccatcttggcgggagaaatgataatggtctgcacatcgcggtcgttcagcacatcaatcagcgtatcatcgttggggaacaccttgacccccatcatcaccttattgataagctcaggttcgtccgcaatgaatccacgcagacggtagtggttgcgcagattgacacgcaatgccttggcaatgttgaccccggcttccttggcaccgtaaatgaacacattggcactatgggtgccgtcaaagttcagcgcctcaaagaaagtcttgacaaccacacgggagcatgccatcatggcaaagctgatgatataggacatgaacagcacgctgaccggagccaggttaaactccaaatagctttccgtcaggacactcgttatcatcagcagtgcatacgacacagtcaatgacacaaaaattcgcatgatatccacaaaggaggaaaagcgcagcacattggaatacgtacggaaaacacggaagaaaatcaagttgacagcaaccgtccataaaatggtcttgtcaatggtagaggattcaaaaaaaatgcttctgaaatcatatcggagagcataggccaacatactggatatgacgattataaatacgtcaattaatagaatagtccatatcggaagcactttcgcggaaagataccgatgaaaaaaatttcgcttcattttgcttgacagttttgttttaggcgaggcaaagatacactattttagtcaaaacgggcaaaaaatcgataaaaaaatgttataataattatctatcctctataaagaaaccatcccgccttcccctgttttagcagccggaaagcgggatagaaatagttttaccccggaaaatgcgatatccgctacatcagattacttgccaactcgctcaactggctacgttctcctttcaccagattgacatgggcaaacaagttctggtccctcatacggtctatcatatagacaagtccattggactgactgtccagatagggttggtctatctgctgaatatcaccggtaaacaccattttcgtgccctcaccggcacgggtgatgatggtcttaatctcatgtggagtcaggttctgggcttcatcaataatacagtaggtttcgctcaagctgcgcccgcggataaaggccaatgcctcgatgaccaattgttcacttttttgcatatcctccaagcgtttcacttcagaggaattggcagcgaactgatgcttgattacattcaaattatcaaacaaaggctgcatgtaaggagccactttctcattggcatcaccgggaaggaatccaaggtccttattggatagggctacgatgggacgtgccagaagaatctgcttgtagtcggtaagttttcccaatgcagcggccagtgccagcagggtcttgccggttcccgccttaccagttagggcaaccagcttgatgttcgggtcattcagcacctcaaaagcaaagctctgctcagcattgcgcggttcaatgccatagttctttgtcttgttgacccggcaaatcgaatgggtaaagggattataacgtgcaagcacactgctgcggtcactcttcagcacaaagcattcattaggacgaatgatgtccttaaaatcaaactcgttgatgtccagtccttctttggaagaataaatgcagtctatcagcgcagggtcaataccctcgaacacttcattcgacttttcgaatatatccacattgattaccttatcattgatgtagtcttcgcacagcagaccgatggaacgcgccttcatgcgcagattcacgtctttcgtgacaagaatggttttcattttaggctttttggtagaaagccagtccactaccgacagaatctgatggtcgggaatgcgttcgggaaaggaatcacgtgcccggggagagtccaccatgcctgccaccacaaacagacggcctaagccctctcccaatggcgctcctttggtgaacagattgtcatcggtaatcaaatctagctcacggacgaactcacgcgcattgaaattaatctgctcattacctttcttgaatttgtccagttcttcaaggactacgatgggaagataaatgtcattctcttgaaaattcttcaaacagttataatcatgaagaatcacatttgtatcaatcacaaaatttttcttagctcccatacacgttagatttaaattgttaatacctttgcataagcttaagataagctacactgcaagcaatttcaagcaagcttgattgcgttcggtctgcattatctttgtcgcttttaaagataacaaattaatagggagaaaggattgcttctccgttaaatattataaaagatggattatcaggacactttaacttacttatataacagtgtgcccatgtttcagcaagtgggcggctcagcatacaaggaaggattggaaaacactctgaccctggacgcacacctcgaacatccccaccgcagtttccgcagtattcatgtggccggtaccaatggaaaaggttcctgctcacatacacttgccgccatactgcaagaggcaggatacagggtcgggctctatacctcgccccatctggtggatttccgggagcgcatccggattaacggacagcctatacccgaggaatacgtcatccgttttgtagagcaggaacgtggcttcttcgaacctctccatccctctttctttgagctgaccaccgccatggccttccgctactttgctgatgagaaggtggatgtagccgtaatcgaggtgggactaggtggacgcctggactgtaccaatatcatccatccggatgtatgcatcatcaccaacattagttttgaccatacccaatttctgggggacaccttggcaaaaatcgcaggagagaaggcaggaatcattaaaggtggtattcccgttgtaatcggcgaaaccactcccgaaacgagaccggtatttctggaaaaagcacagacaacgggtgcccccatctactttgccgaagagaatgaccgtgaggactatcccggaatagaatacgaactgaaagggctctaccagcagaaaaatgcccggaccgtcctcactgccctcccgctactgaaagaagccggctaccggctggacggacaagcggtgcgcagtggctttgcccgtgtggtggaactgacaggcttgatgggacgctggcaaaaactgcaggagtcgcccaccctgatttgtgacaccggccacaatgtgggaggcatcacctacattacagaacaactgaaacagcaaacttaccgccagctacacatcgtcataggcatggtcaatgacaaggatatacggggggtactggccctgctgccccgggaagcgacctactacttcaccaaagccagcgtgaagcgggcattgcccgaaagcgaactgcaggagcttgccgaagcagcaggtctggaaggagattgctatcctgatgtacccgccgctgtgcgggccgcacaagaaaaaagcctcccggaagatttcatcttcgtgggaggcagcagtttcattgttgccgacttgttagcgaaccgcgatgcactcaatctctactaaggcgtctttaggcagcgccttcactgccacagccgaacgtgccgggaaagcaccgtcaaaataagtggcatataccttgttcatatcagcgaacaaggacatgtctgccaggaaaacggttgtcttcacaatattcgccatacccagccctgcctcttccaggatatgctttatattctccaaggactggcgggcttgcgcttccgcaccttcagccatcattccggtagctgcgtcaatgggcaactggcctgatacaaataccattccgccagcttcgatagcctggctataagggcctatggcgcccggtgcctgctggctgcaaatcactttcttcataattgtcaaagtttgtttttattaataatcgagtctattttcttttttgaaataaaaaaaatcagaagtatatgcagtattccggaaatccacgcattttataaataaaacaacgtaatttcactcataacctgttatacctagacttaactcatttaacacgggggagttccccaaaacagagaaggtgtgtcgtaatgcacgatgcaccttctttcttgtttatcaccgatataaatcggtttattttcttcaagctgcgataattcgaagatttctttgatttatgtgtctccagcatctaaataaagcgacagtaagctcataaaaccatcctatcagccagttcataccttcttttgtcagttttgcacacatcttttttatattgaaggcaatggctaggaaggcaaagtccatgaagaccttgtcctttccaaaatgtcggaaacgtttgtagttcatattgtttttaatttgtccgaacacggcttccggttctatgcatctctgccctctgtgtttcagtcctttctctgagcagagcagttctttggctctccgcttgtattgtctaagcctatgattcagttctatcgtcctgtttccttttgctttaaaacagcggcatcgcaggggacagccttcacacctgacagctctgtaccgtgcattttcgctgacatatccggatgcggttttcacattcctggtgcctatcctccgcatcctttgccccataggacagatgcagaagtcatgttcttcattgtagtagaagttttcggccttgaacgggtccggtttgaatctcggccgctgctccatgtggaaatagttgtactttacgtaggcttccatgccgttttcggacatgaagcggtaattctcttcggagccatagccggaatcagcaaccaccgtatgggccatccggtcatacctgtttgaaaaagattgcaggaaaggaatcagggtcagtgtatccgtagggttcgggaagagtgcaaaatcggtgatgaactgattttcggtgccgatttgaaggttgtaaccgggcttcgtctgtccgttgcgcatggcatcctccttcattctcataaaagtagcgtccttgtccgtcttggaataggaattcctctcttgcagtgtttccagatggcagtcgtattcctgcagtttgtccctgtgttcttccagttccttcagctgtttgcgtttctttttcagttcagtcttttcctctttcgcggatggctcggaaacctgttccaatgcatgacgcaattctcctgccatttcagtcagcatggccggagtgaactcaacctcctcattgttctctgatgacttctcccgggcaatgacatcgtctatctgccctaacaggacatgtatcttcttcatcaggcgttcacggttccgctcaaccgtttttcgccagacgaaagtgtacttgttggctttggattcgatctttgtcccgtcaatgtattccacattcaggctgatgaagcctttggaagagagaagaagtacggtttgcgtaaacacctcgttgatttccttcttcacccggttgcggaaacggttgatggtaatgaaatccggtttctcatatccggccagccagatataatggatgtcacggtgaagaagcttttcaattttccggcaggagtagatgttgttcatataggcatacagaatgaccttgagcatcatcttggggtggtaagggctgcggccgcattccttatacagctttctgaaactttcaagattcaagccctcaaccagggcgtcaaccatgcgcaccggatcgttttctgcaatatcctcatcaattctttgaggaaaaagaacggtttggttgggaatgtaaggacgaaaatgtatctttgtcatagtgaaattcttatgcctaaagatacagaatctttaggtaataacaaagccccagcttgtgaaagtcggggctttgtacgtaaaataatgaaggtgtgcattttgacacaccttctttattctatcccatccctttacttgcaatgcttctcaatcaaagcatccacattgggatcacccaattcctttgccttggcaaagctggtacaagcttccttgtccttcttcatctgcagctgggcgatacccatcagacggtaggcctcggcatacttagggtctttctccaaggcagccttcagcacattcaacgcctcctcgtaacgtcccacgcgaagattcaccactgccagttcggcacggtaggtcaaatcctccggattcaattcgatggccttcgccatatcgtccagcgcacgctggtactgcttggccttcaaagcagcctgctcacggtaatagtagaacatgtcgttcactttaccgttcacggcattgtaataggcgtcataatccagcatggcattgcgcgcctggtctgcattcatgcgggcttgggcacgctccaataaataaggggcggcttcctccgtatagggctgggtaaagcgggccacacagctgtccatcagagccagtacctcttcggcaggtgcctgcatcaattccttggtcttggcggcactgaagaaggtagccggagatgccagaatggtcttattcactttatcatagctggtaaatgccgacggatactcctgcttggcaaacaggatgtcaccctccaactggacataaaccggaagttcgtcaatggctatcgctttccgtacctcgtccagagccttgtcgagcgaccagtccttataaactttctcgggcttgcccaatgcataattatagattatcttggcccgattgtaatacacatcatctttctttgcggcaacctccaaagccttatccatgtctgcagcaaccttatccatggaagcatcttcacgggacatgaacagatgctgggaagcacggcgcagataaccgtcggcactggcaggatattgtgcaatgaaatcgttcagagtctccatatacttctccggagacagttgggaagaagccatgtagaggaacaccaaagcctgctcctcggtatcgggcaatgccttcttgataccgatgcccttcaatgacatatctccataagacaatgcggagatattctgcgacatggcgaaattagcgtcaatggcatagcagatggtagccgtgtcttgtccggaggacttctgcgccaggccgaagacctgcccgtccacagtcatcagcggacagctcaccatcttgtccttcagacgcatatcgagcgtgtaataggaatagttgccggaaatcttatcagcctcctttactttcccggtagtaaaagaacggtccttctgggtggaataaggcagcaaatatacatccgcgccgacagccggagccacagcagccaaagtgagcgccgtgactttctttccggggatgccgacacggaacttgacaacatcgtacatatcatcagctcccataatggcctccaccggcatctgtgccccgtccgagctcatcacaacggcgcgctgggcacctttgaacaaggtgtagtcagaaagcgcaatgccatcttcagtgacaaaaaagccgtttccagtattcagtatcttatcgttctggtcgtaagtcactaccgagaaaaccgcacgtttggctttgtctacccacttcggggcttgtgccacactccactgagccaataaacatagagtgagcatcaacagcaatttctttttcatatcttagttggttctttgttttaccgcttcataaatcaaaatgccggctgcaacggaaacattgagggactcgatggttcccaacatgggaatcttcacccactcgtcacacaacgccaggttgtcataggacacccccttgtcttcagcacccataatgatgcacatcggaccggtatagtcggctttggtatagtcgtaatcacctttctccgtggctgccacaatatggaaaccactgttcctgaggaattgcagggtctctttcaagctgtgttcgcggcaaacgggcaaggtgtgcaaggctcccgccgaggttttcatggcatctgcgttgacagatacactgttccgtgcagggataatcacggcatctaccgccgcacactcgcaagtacgggcaatggcaccgaaattgcggacatccgtgatgccgtcgagcatcacaaacagaggattcttgccctgctcgaaaaggaaaggtaccaagtcctccgtcttctggtaagtgactgaagagatgaaggcaatcactccctggtgattcttacgcgtcacgcggttgatgcgttccaccggaacgcgctgtaccggtatcaaagtccctttcaagacagcgaacagctcttttgacaaatcactctgaatgtccttctttaccaatatcttgtctatctcttttcctgcctgaatggcttctatcacggcacggacgccgaaaatcatttcactgttatcaaccatatatgggtatttactatttgacgatttactatttactatttgatacttccagcaatgctctggcattgttcagtgcggcttcggtcagcttagcaccactcagcatatgggctatttcttccacgcgttcatcgtcggtcagacgacggatgtgactgtttgtttccgtctcgttgtcctgcttgtacaccttgtaatgggcgcgtccacgggcagcaatctggggtagatgggtaatgctgattacctggcggtcctgctcgcccatctcctgcatgatatccgccatgcggtcggctatctcgccggagactccggtatctatttcgtcgaatacaatggtaggaagcttgacggcaccggctatcattgctttaatggaaagcatgacacgggctatttcaccgcccgaagctacagaggagacgctttgcaatgccccgttcttattcgcggaaaacaagaagttcacagtatccgccccgtgtatgcccggctctttgcggacacctatctctacctggaaacggacattgggcatgcccaacggaatcagccgcgcagccatctgcttctccacttcacgggcagcggcagtacgcgccttggtgaggacagcagcctgctttttcaccttattatataaagcgtcgcaacgcgctttcagttcctctatgtgctcgtcggacgaagtgatagcagagagtttggcggcgtattcatccgtcaacgccagaagttcgccgacagtggaaacgcggtgcttctgttggagcatataaatcaagttcagacgttcgttcacttcttccagacgttcggggttgaactctatttcatcctccttacccgacacttcctgcgaaatatccttcaactcgatataagtgctttccatgcgttcggcaagttctccggcaaccggataaaccctctgcaggccgagcatcgtgttcaagcattccttcagcccggacaacaagcctccttcgtccgagtagagcgtctgccccacccgatagagtccggcctttatctcttccgcatggctcagcgtatccgcctcttgctccagctcctcctgctcaccggcagacaagtgtgcctcttccaactgttccagttggaaacggatatagtcttcgtccgacttatcctgattggcacgggcaacaagggcctccaaatcctgctgtgcctgcttccatgctccgaagatatgctggtaagcagacaaggcatcttcgttatgcgacaagatgtccagtacattcaactgaaatccttccttgttcagcaataggttctgatgctgggaatgcacgtcaatcagctgttctcccagctccttcatctgagccaatgaagcaggcgtgtcattgatgaatgcccggctcttgcccgaagcggacacctcgcggcgcaggatgcattcttcctcgtactccaactcattctcctcaaagaaaggctgcataccgtaagcggaaatatcaaaacgggcctcgataatgcacttcgaagctcctacacgaatggctttcacatcggcacgctgtcccagcagcagaccgatggcacccagaataatggattttccagcaccggtctcacccgttatcaccgagaaaccgctgctgaagctgatatcgagcttttcaataagcgcataattctgtatgtaaagcgaacgcaacataaggatattgacgatttactatttactatttaaatctttcaccagacggtctacgatgtcggtagccacttcggctttggacttcaaggggtagtccgtctttccctggtggtctatgatactgattttattggtatcgcaacgaaaaccggctcccttgtcgttcagggagttcagcacgatgaagtccagattcttgcggttgagcttgtcttccgcattcatctgctcgttatgagtctcaagggcaaagcctacgaggaggcgccgttggtgctctgtatcgttcttcagattgcctaagaaagcggctatgtcgcgggtaggtttcaagttcaaactcatctccccggtcttttcacgtttgattttctcatcggcaacttgttcgggagtatagtctgccacagcagccgtcaagatggcggcatcggcatggacaaaggctgcggatgcagcatcgaacatctcctgcgccgactctaccgcatggtattgatgcatcggaaaataagtggtctgctgcaccggaccggcaatcagtatcaccttggctccccttgcagcgcattcgtctgccaaggcaaatcccatcttaccggaagaatagttgccgatgaagcgcaccgggtctatcttctcataagtaggtcctgcggttatcatcactgtcttccccaccaggtctccctctttggcagcaaagtacatttccagatggcaaatgatattctccggttcctccatacggcctttccccaccagatggctggcgagttctcccgtagcgggttctatgatgtggtttccataagaacggagtatatccagattcttttgggtggaaggatgggcatacatgtccaggtccatggcaggcgccacaaacaccggagctttggcggaaagataggtggtaatcagcatattgtctgccacgccattcgccatcttgccgatggtggaagccgtagccggggctatcagcatggcatctgcccacagaccgaggttcacatgactgttccaggtgccatcacgttgtgcaaagaactcactgataaccggtttgctagtcagagcagagagcgtgatgggggtaataaattccttaccggcaggcgtaatgaccacctgcacctctgcaccacgcttaatcagtccgcgaataatataacatgctttataggctgcaatgctgccagtaatgcccaatactattttcttccctttcagtatatttgccatttatttctgagtcatttcacgcagacgtatcttggtcagcgtggctttggtattcaaagtaaaatcactgttcagaatccaactgtaatagccgggatcgcgcttcaggacatcggataccgacatgcccttgtacttgccgaagttgaatacttccacacctttgtcatcgtaaaccatacgaccggcaaagtccacattcttgttgaagctggaatagtcggcaaggaaagccacgtcattctgcaactccggatagcggtccaactgcgacatcagcacctcgtaggtggcacgtgtatcagcctctgccgtatgggcgtcttccaaattcttgccgcaatagaatttataggcagcagacagcgtgcgttgctccatcttgtggaagatgacctgcacgtctacaaacttgcggcggctcatgtcaatgtccacaccggcacgaaggaactcttccgccaggacggggatatcaaaacggttggagttgaagcccgccaagtcgcatccttcaatgtcattggcaatgttgcgcgccacttccttgaatgtggggcagtcggctatatcggcatcgtagatgccatgaacggcagatgcttcggcaggaatgggcatttcggggttgatacgcatggttttggactcctcattcccgttgggatataccttgaggtaacaaatttcgacaattcggtctgagttgatattggtacccgtagtctccaaatcaaaaaagactatcggatttttcagattcaatttcattgttttttcgttttataagctctggctatgagctataaattataagtttaacttacaagccacgagctacaagtaccgtgcggcataattgcgcagccacttgtagctcgtagctcataatccgattgctaatattcatcagtcattcagcatcatcggcatcagcagcatcagcaagtcttcgttctcttcctgctctaccggaataatgacacctgcacgtgaaggatctgccagttcgataacgatttcatcggcagaaatgttattcagaatgtcaatcaggaaagtggacttgaaaccgatgctcatcggattgcccgcatattggcaaaccagtgtttcttcggccgatgtagagaagtcgatgtcctgtgcggagatgacaatcagattctcctgcatacggagcttgataaggctgcttgcctgcgaagagaagatggacacgcggcgcaaagcaccgagcagttgcaggcggtctaccgtcactttataagggttgttctgcggaatcacagagttgtagttgggatagcgaccttcgataagacggcacaccatgcggtagctttccagtgtgaacacagcgttgcgttcgtcgaactcgatagtcaccatgccttgctctttcggcagcagattcttcatcagcgaagccggcttcttgggcaggataaaggcggcacgttcgttacctttggcggccagtgtcttgcagcgcaccagcttatgaccgtctgatgccaccatcgtgatgtcctccgttgtgatatcgaaatagataccgttcatcacgggacgaagctcgtcatcagccgtagcaaacacggcacggttgataccacccagcaacacttgtgcatccatttccacacgtacggcattgtcacccaacatggcagactgcgggaactcgtccgcattctgccccatcaggctgtatttaccgttctgatactgtaccgtgatttcaagggaatccgtattgatttcaaaagtcaacggttgttcgggaatttccttcaaagcgtccaaaagggttttagctgtaacggcaaaacggccgtccatatcactttcattcacttcgaccgtagtgaccatcgtcgtttcactgtcggaaacagttgcagacaaggttccgtcttgcagttcaaagaggaaacaatccaaaataggcaacgcattcttcgaattaatcacacggctgatagcctgcaaatgactggagagcgcagtactcgaaacgataaatttcatatcttctgtatatttaagttttttattttgctaacgtcttagaaaccgtttttatatttttcaaactgacggacaaagttaaaaaaagaattccctacgacaaagaaatagcaagaaaaaacagccgaatattcgtctcatattcctaaaaaattgtaacttcgccgcatcatttaaaaagaaaacaatggaatttacaggaaaaatcatcgctatactccagcccagaggcggagtttccaagtcgggtaacgaatggaaagcacaggaatatgtgattgaagatcatggtcaatacccgcgtaaaatgtgttttgacgtgtttggagcagacaaaatagaacagttcaatattcagatgggtgaagagttgacagtatcttttgatatagacgcacgccaatggcaagaccgttggttcaacagtattcgcgcatggaagatagaacgcgtaagcactgccgcacccactccgggcgctcccgttccgccgccagctcccactgccgcaccggaattcctcgcaggggatgcaaaggatgacttgccgttctaaaactaagttataactcaccacaaaattgtacagattaacgcatattaccctaaaacattgataatcgacatcttcaattgcagcaatctgtgtaattctgtggtgaatgtatattttgactttccttgtgcctattatccctcagcacactacagcacgactgattaatcatcccccttataaagcaatacaatattcggataaaccaccccttctgtacaagtgaactgtactgcaagcatgaagtgacggaagaagttggattggcggaagaagaagttcggtatcagacgcacatacgtttccggctgactcagcatcatctccatatccaccatcattacaaaattatatatgggtgaaagactgccgataccctcttcatatatggggcatagaacgaagcggttttttcaatggtcgggaaaaatgggcgaaaggttttgaaaaccaaagggtttaggcatgatcgggaaaatgggctgaatatttcgaagcggtttttctctttacatggcttacatctgctttacgtttgaggggcttttcttcggatattcgggggattgctttacatcgggcttgcagatggggctaaaacggcctggaagggttttattttcggctgtgtggccgttttatggctgggttgatggattttgttatatgatggtgtgaacggctgtgtggccgtttttttgtgcctatttttaaagatgttgccttaaaattcttccaaataagtattatttggtatatttgcagcataatagaaacgaatatggcaaaagtgattcatgtgcatttgctgcataaaatagacgggacgaagcagaaagattggtatttcagcagtatatcggctgtttatacggttctgacggcagatcaggtgggggcaaccaagaattacctgcttcatgccgggctgtctggtaacggcacaatatgcacgaaaaaggctataattaagcaatctacgctcatctcgggtggtagtaagggaatggttagaacgatataatagcgccgttagaaaggcttgtaggcgttatttctttgaatgctgattggggagcttatggctccctttttttatgcccctacggttggttttatttggttaggggttactattggggttactgttaggggttactacttctttaagttaggggttactttaggggttactttttcagttctcagagggtacgcccgaaataggaaactatgttataaatgaaagcaagtgccgtttttctctgttttcagagaggaaaaacgacacttgtttgtgtgatataccttattataataaaataaatcctttgatttacagtgtatttacgagtttgcttcaggtaaattccttcaaaagtgtgtgcgtgcgtccttttttagccttctgtaggaggcatgcgtgtaccacttagaagaacttgctgatacttccgattacttcaaagacattgatgatgcgtgatttgtcgaattcctgttcatcgtagtcattggtgttgatggggatgaagcgcagcttgtccggatccggcgacctgcggaggattttaatggtgcggatggtatccaacaccactgcatagatttcgccatattggatgtcgttgagtgtgcattggtgcagggcaatgatgtcgccatggtttattttgggttccatggagtgcccggtgacattgcaccaaaggctggctttttcgaatccccttattacaatgttggtggcaggtatgtttacctgtgaattaaacacttcatcaaagcccccgataaagtccacatcgtagtatggtgtaccgatggatgggttcatagatgtggtaggcagagtcgaagaatttgcttcgtctattgttttaatgccgttcaaatcatctttcaacatgcttcctgcaccagtaagtaaccaatcggcagataattccggataggctaatagaattttttcaatattcattgagctcatgcctttgccagacacctttgctttcccaataagtccaacagaaagaccggcattaacagtcatttgattgtcatttatgccctttttctccatgaaatattgaagtctttctataaaattcatatccttatattgattttcttccatatttagtttgatgtattgaaataattctatatatttgcagcgtgtttaagatgtaaacagcgcgccaaatatacaaaaaaggcgtgtgattagcgaattttaaggattaaagaaaatgaaagcaaaagtaattatagctcaagcaacagccgagaccgccgaagctctttacggactggtcaagaagatggtagatacaacagcaatcaaggcttatcccagtgtagattatcaggcagttttcttttcagctgatagatacgacttagactttgtaaaaagagtattggcggataagtgcttttctttcaaaattgaagatgcagaataatacaataaaataagtgagtttatgacacagcaagaatttatggaacggacggggataacccctacagcagaggattttgattacatccatgcggtttatctgaacacttcgatgaacaaggatgagttctgcaaagatttcaagaaacatggggacagccggattatccgcgatgttcatgtgcgagtgctgaactatgaaatgaaatgtgaacgtcaaaaggaagttatcgacaacctgaccgattttctgattggcaaggcacatgcgtatgacgataccgatttccgcaaagaagcggtagggctggtcggtgagatggaagtggtgaaacggaccattgaattggggcttccgctttgggatgaagacaggatggttgtcctttcgatgatagaagaacaaggcaaatagattgccggataactggcagcccggaaagacgggcaggggcggcaggcacggccggagagttggtaaatcgaaataagaaagcgtagaaagccgtcggggttcgattccccgcgccccacgatataaacttttaaaatttagagttatggcaaagaatttcaatccgagaacagcagagagtctgttcaaacagaagttgcgcacgatgataggcagtacggcacatacgcagaatattgccgaccaggcgatggagctggctggacaattcatgacggaggatgagataagcaactcggatgcctaccgggtgatagagaatgtgagctgtgtgtgtgaggaagcgatgcaggtgctggtcgaagaactgcagaaagggacacgccttcatgaaatactgacgggtgattaggaaatagcggaagccgttgaaaacctttgaacgaacgataacgattaaaaagtatgacgatatgagaaagcagattttgacagataacgagaccaagaccttcttgatgaagacattcggatgcagccgtcaggctgtgtggcaagcactgaattttgtccgtgacagcgatcaggcgcgccggatacgcactcttgccctgaagcgaggcggcaaactgactgacgggaacttcatcccgaactgcgaaaccaccttcgaggagtgcgagaagaccatgacctgcactttcggtccccgtgtaaaactcgtggtccacagaaagaccaatgatgtggatgtgtacgtggacggaaaacggactgaaacctaccaatgtgaatttgtatcggatttcatgcagctgcagcacgagacccaacagatggcatctgccttataaatagaaatgaaatggagtattatggaaagatattgtgcatatcctacaatgacctgacttacgatgaccgaccggtgatggtgaacggaaaggcagactacagcagaagccgcacgctgaaaggagttcatccttccactctttccgaagaagaacttgctcccatcatgtcgatacccaattacaagaagttagcggcaaaggagaaaatcaatgtagttcgatccggaagaggtctgggaggttacgttttggtagaaatagccaccatgcccctacggtttcaggaaaggataaaactaaaatacggagatatgaaagaagacgtaataagaaactggctcggcagccattaccacatcgatgcgaaagcccgggaattttacacccggttccgttttgacaacggagatacactgccaccggaacacatccaagaatatacggtaaacgcttcggtaattgaggcagtgatgcgtgccatggaggatgccacgtttatgcgaaaggccatgaaggccgggccggtgaactggggcgaactggcaggagccatcagttactaccaagcagagttcggacataccttgcctgtcagttccaaccgcttcaagaagcgtgtgaatgacttcaaggccaacggctatgaaagccttatcagccgcaagttcatgaaccagaaccgccggaaagtgacctatgacattgaacgcctgctgctgagcatcgatgcccaaccggagcagcccttcaataccaccgtgtgggaacagtacaatctatttgtgcaaggagaactggagctatatgaccccgaaaccggcgaggtgttgaatccggcagactttaccgacaaggatggaaatccgctggtattgagcccggccacagtagccaactacctgaacaaccccaagaacaaggcccttcgcggtaagctgcacatgagccaatgggatttcaacaatgcctaccgtccttatcatctgcgcagcatcggtgaatattccttgagtaaggtttctcttgacgaccgcgacctgccgcgcccaatgaaggatggcaaccgagtgaaagcctattatgcctacgatgtggtgagcggtgctgtggtgggatatgcctacaaccggtacaagactaccgagttatttttagactgcatgcgaaacatgttccagaccctggaccggaacggcatgtatatccccgccgagttagaagtggaacaccacctggtaagcgactttgccgacggattgatgcaagccggtaccgtcttccccctgatccgctggtgtaaccccgggaactcgcgtgaaaaacgtgccgagcacaagaaccgcgaaaagaaatacggtgtggagaaacgcacgcaggtaggtatcggccgatggtatgccaagctggaggccaaccgcccgaaggaagaaaaggtgtatgacgaaaagaacaacacctacaaggtgaagacctatagttatgaagaattggtagccgatgatatacgcgccattgagaccttcaacgcacagcctcaccccaaccaaaagcgctatccgggcatgagccgttgggatgtgctttgcgcccatcagaacccgaaccttgcaccttgggacaaggccgttctttaccggttcatcggacagcacaccgaaacaaccatccggcagaacacctactgcacggtgatgtacaaccaatacggactgcccagcccggaaatcatcgaaaagctggagccgaggaactacaaggtagatgcctattatctgcccgatgccgacggaaccatcaacgaggtatatatctaccagaacggacgatatatcgccacctgcaagcccgtagcccgttacaatgagaatacagccgagcagaccgagtacgacaaggcagcctataccgaacagtccaagtatgtagctcaattcgacaagatgatgaaggacggcaagatcaagcgtgtgggcatccttgccaaagaggaggcaaagctgataacagaggtacaggcggaagccgttccccttcctgcacaagccgaggaagaagattactcagcctatatggacatcagtgccttcgagcatgatgcagtagccaagatataattaacgacgttagaacgaatttaaaacagcattcaaatggaaataacaaatgaagtaaagcaacgtattgtggcagcgatagccgccgaccgtgaaaattatcccagtgacaaccgccatgccacggcactgggcatagcccccagcgtttacaatgccatcaagcggggcaattatgaaaagcaggtcagtgatgccaactgggtaggtatagcccgaagattaggcgtgcaactgcgtacagaaataccttggctggcagcacagaccccgacctacgtgtttgtgagcaagcagctggaagtgtgccagggaagcgggctgagtgccatcctgtgcgatatgcccaatatcggcaagacctttacagcgaaagcttacgtgaagcagcacaagcacgccgtatatgtggactgcagccaggtgaagaccaaactgaagctgatacgctacattgccaaggaattcggtgtgaccagcaacggacgctatagcgacgtgtatgaggatctggtggcctacctgcgcacgattgatacgcccctggttatcctggatgaagccggggacctgcagtatgaagccttcctggagttaaaggcgctttggaacgctacggaacgctgctgtgcctggtatatgatgggtgccgacggattaaaggagaagatcaaccgcgccatcgaaggcaagaaggtgggctataccgaaatgttgagccgctacggtgactcctacagcaaggtgaccccggacgatgcgcaggaacgcgaaaagtttctgaaggcacaggctgccatcgtcgcaaaaatcaatgccccggacggtgccgacattgccaagattgttcatagcaccggaggcggcttgcggcgcgtatataccgaaatcgaaaaattaaggaggatgcaggcatgataagcaagatagaaatgcaagcgatggatgctgttatcggtatccatcgcgagatgagaaaagcgaatgagatagactgggaacagcgcagatatgaaattgccaaaagcatgcttccggtagtaagaagcaattcatcaggtataatgtctataaaacaagttgccagacttgctgtggactatgctgatgctcttattgaagaattgaaaggaggtaaccgtgaaactgaagagagcctacagtcccggtgaggtgctgaacatgaagattccccggttcgagttttccggggactggcaaacctcgataggcaacccggccaagagcggcgtgtggattatttggggagccagcggaaacggtaagagcagctttgtgatgcagctggccaagtacctgtgtagcttcggacgcgtaatttatgacagtttggaagaaagtaccggtttgtcgttccagatgagcctgaaacggcacaagatgggtgaagtgaaaaagaagctgattatccttgaccgggaaccgatggagcaattggaggaacggttacggcgcagaggcagtcccggaatcgtgattatcgacagcttccaatacagcggcttgaactacaaaacctacaaggagttcaaggaacgtcatcccaagaaactgtttatcttcatcagccatgccgaggggcttcatccggcaggtagaagcgcccgcaaggtggaatatgatgccgatgtgaaaatcatggtaagctgtttcaaagcctggtgcaaaagccgctttatggagcggcccggtgagccctacgtgatatgggaagaaggtgctgccaaaacattgaaggacgataatatggaggattatttgaatgatggaatgggagaataagctgtaccagatactcctgaaagaacaggaagcggaggccgtggtggacgattgggtagaacgtaacatacaaagcgacctccgtctgcgcagggccaagacaaagggacacgtagtgatagaaaccagggatgtgatgtttgctcggaatattcaggtatggcatccgtcctgccaaataaacattaaagatttgaagtgatggaaaagaaagaagaaaagaaagtgtgctgcatctgcggcaaagagtatgagggctacggatacaatccgttcccggtgaaagaagaaggctgctgctgccaatcgtgcaactacagtgtggtggttccggaacggtgggaacgacacaaggcttttcaacgtggtgaagcgaccggtgccgggaaagtgtacatcagcggagccatcgcgcactatgatatgaatgagcgcaaggaagccttcagccgtgccgaggagaaactgatggcacaaggctatgatcctgtaaaccctttcaggaacggattgccggatgaagctcattggagagcccacatgcgggccgacattgccctgttgctggcttgtgactatatctacatgctgaaggactgggaactgagcaagggagccaaactggagcttgacgtagccagttcgtgtggcattaaagtattgtttgaataaccttttaatagtgaatgtatggaagaaaaacagaaagttcaggtcgtatttgaatttgaccgttccgagtatgacgcgtatctctttttgatgaatcaaaagaagacgaaagaggtagagcaaatatggaacaccatgagcggtgagcctgtggttgcggatattgatttgtttgaagaggacagccagtctgtaaaacttatgatgataagtttggcaattctttcagtggagaaaaaagtgaaaggatgatatggcacaggaagtaaccaatttcgcccggttctatgcattgttcaacaaactgccttatcagggcgatcgggaggaattcaaaaaacaaatcgtgctgcagtacacgtggaaccggacagacagtctgaaggaaatgacggccaaggagtatgaagtttgttgtactgctctggagaaactgagcggacaagacgaatggcggcagaaacttcgcgaggaactgcgacggaaacgcagcgtctgcctgaagctgatgcaacagttgggtatagacaccaccgactggaaccgggtgaacgaattctgcaacaacccccggatagccggcaagccctttgttcaggttagtacagccgagctggaacaactggccatcaaactgcgggctatccaacgaaaaggaggtttaaccgataaatagagcaatatggataaaaaagcacatgaagcgcttgagcgcataagaaaagacgtgacccttacgacatccgatatggagaaccaggatgcagcggagtttttcaacgaactggccgactgggcgtatgccaatggggaggccatgctgatagacgatgaaccggaaaagcaggatgattatgaggatagatgaccaagacaagctgataaaagcggggttctgtataatacgaaaggatgattatccaggcccgaggataaagatgtgtaccggcataaacggtggctggaagacatacaagaagtttgaaaccaaagcagaaagagacaggacattcgctttgctgctgaaggatgacaaagtaatagctgattaacaactaaaatgatttaaaatggaaaagaacaatcaaagtgtggacatcaagtccctgagtaaagaacagcgagcagccctcatggcccagctgcagcaagaagagaaagaagaccgcatcgcccgtcgtgaaacttacgaggcattacgcggtgagtttatgcacgaagtaaagaccaacgttcttgagatggtgaatgccgtgaccgggttccgcggatggctggaaaaagaagccgatgcctttaccaaggtgatgaaggaatacggccaggtgaaaagcgacgaacagcgcagctataccattacggacggagacttccgtctggaagtgaaaagcaacaaggtgaaaggcttcgatgaacgagccgacatggcagccgaccgtctgattgactatttgaagcgctacatgcagaacagcgagaaaggttctgatgatccgatgtatcagatggccatgaccctgctggagcgcaacaagatgggcgacctggactacaagagcatttcaaagctgtatgaactggaagataagttcgatgaagagtatgcagacatcatgcgcctgttcaaggaagctaatgtagtgcagcgcaatgccaccaactactacttcagccgccgcaaccctgaaaacggcgtatggacccgcattgaacccagtttctgccgtttgtagccgaaacccgttaaccctataaacagaaagcgccgcagttgttataattgcggcgcttttgttcttaaaatagatggaaatcagttatttttgtaagagaaataaaatgtatgggcaaaggacgggataaagaactgatcaagctgcgtgacgaggcactatgccgtcgttactactattggacagaaatacagcggttgcggttcgacgatgctttaaaagtgttgtcggagcgcgaattctttatatccgaggaacgtatcatgaccatcatccgccggaaatcacgtgagggaacagactacaatctgaagcctgttcccaaggtgaaagccccccgtctgactgccgcccagctggaactattccccataagatgacggcatggccgattcatcgtgcagtgtgaatgagaacgtcatttcatagaccttgatgtaatgcggcatggcatacgaacggcttttctcgcgtaccagcggcgaagcgttgtccgtgcattgcagacactgcagcgacttgtataatttcttggccagctgctgcctttccctcaccttgtcatacgtgccggatgcgtagcttgtatcgtcgtaacaatcgatggccagccggacggtcagtgcggattcgcttttctgtgccccgtatccgaggtcgtgccagtcggagtttgtatttccgattaatacacaagggaaagtgaccgggtactggtcttcttctgctcccatttccaattgtccgtagtcctcgtcgatgagagagagttccggcatttcctgtgcaatctgttccatgattgcgataaaaatttcgtccatatcgttattggtttaaaatgttggtaatttcctggtccaccttttcccggatacgccggttcaattcttcgctttcgcccatgaactggcgctgcgggatgcggatgtgcagtttctttttttgggtaagcgccatgttcctccagaactgtgcctgcggattcagttccttcggcttggaacgtcgtttgacgcgtttcttttgccctgtgccggttttttttctttttcccgaagccttgtagaacttggcccatgcaaagcgcctcatgcggtctgtgacggtgacatcgatttccccgccccagttgttgatgggtgcatagaccacctcgttgaatacccttacccggtagtctgcaggtgtatatccgaccgatttgaacagatgtttcctgccggagagcagcgttccataattgctggcggcatcggaacctcccgaggacagccgtttggctttgggccaagggtgaagaccgccattgacaaatccaccctgccggaagttatcctgaaaatggtctttggccattcgtcctaccatgactggcattttgcggcgcatcatactgtccagcctgtcacgtttccgctttatcatttccgtaaaatcttttatgtccataatcatcagtaattcaagaataatttataactttgcaaccgaggcttccaatatgccttttatgcgttatgaatataccggaacaagtaaagaacgaggcccgtgtacttattgagcaatacggtgacaccttcgaataccttggtatttatgaaggccaggaagcctatgtgttcaagtttccgggggactcctgtaccggttatcctttcgtctatctgtatgacggtaaagacgcaaccgaaataaccggtccgttatcccttgacgttatcgattcatgtatcgaaaatatcgaggaaggagacatcgaatagcttattgtcaattctcaggactcccctgcagttgtgggaagtcgcagctcctatttcacataaatattttacgtctttccattccattcctgaaccggcagaattatcgctttggggttcgatataccttagttcaccatccgcaaaccgttgcaggattgtagcatgacctcctccacttttccagccgatgcacaattcatacacgccttcttccttacatacctcattgaaatactccatgtaccttttaggggtcattttcaggtatcctttgtgcgcaagccagctgtttatacttatatgttgcgccggagtaccgtcggtgtttttccagacttcaaaagcacgtccattactcagatattcaagtttagaccctgcgacattgcctttggcggtaatatcccatccacgtaatcgtaaagcgtatgccggtgcgcaagtctggcagttgatactgtatggagtatcccgttttttatcgtaatcgctgttcttccggtatctgtttccccttttatcgcggtatattcctttggaatccaaaatatactcttccacatgtttgggatttgcattctgtttgtccgccttatccacatccataggttttccttttttgattttaagagccttttccatttcgaggttgttccgggcaatggccattttttcctccccggtaaggtagtccggcatttccgcaatcatctcgtcaatacgggccataagtttatccaccgctttttgggcacccttgtgggcttctgcctgatatggatgattgtcggaaaacagtttgccgtccgttcccggattgttatccagtccgggctggggcttgttcttgtcgtcttcgtccggaagtggtgtcggctcctcgtcggtggcagtgaggtcgcacttgcagttccaccggtcgcccggtcggtggatgttccagaacgtgtcatcaatcggccggatggtattccagaacgggcggtggtcagcccccggatgaatggaggtggacggtagccatttgaggttgggcagaatatcgcgttcgcgcaggaactgttgccagtcagccgcctgatgcgcccggatgaccgccgtatcatactccgtccgcagccagtgacgaacctgatgggaagcaatgggcaagacttcctgtacccatttgtcgaacggttttaaaatgccgtttgaatccaataaaagtcgtgccatgtcattctgcatacgatgtaccttgaatgccgagaatacggcattgttccggagtatggcatttctgaaatcctcgtccggagtaatggccttggatttgctgaacccttcctttgccgccttgtccatctttgcccatatttcattgaacaggttgatttcgatttcggttgccggatgaaagtccctgctgtatatgttcagcaaggcacgccgcagcacctcttcggagaagtcaaactccatggagatgctgccattatcagccgcatacagtctgtcgactaccagtctaaagctgccccgtctgccggggctttcacgaaaaaacctttgagccagttccggaagtttcttttctgtttcggtgtcggttcatcatcccgtcccttattcgctggctccggctccttcttcgggcttggaatctggtcggcttgttcagccgtcttttgttccgccttcagctgctcgtaattggccggtttgtcgataccgaattcctcatagagatagtcgtcgtcgatggggatgttgaagttcttcttcagctgcgtgaggatggatattttggtaccggcatccgtttccttcggttcggggaaacagaacgtacccccttcggtgttgatgcccatgcgcagcagaatgtccgtcatgtcgtaattcagcacgttgagcacgtacttccggtcggcctccagtaccttgtcctctactttcttatgaaccgtacccaaagcctgcgtgcctttttcggacgattcggtggtcagcgtattgcccagtatcagtttggaaatttcgttgttgcaccgctcgcagaggcgttcatagacatcggcagaccctgttttgtttccggcttccgtgagtttgagttccgtgtccttggcatggaagaactgcgccagacttccggcattggccgcatcctccatggcccgctggcgtgactcgtcgtcgtcggaatcatagatatattcctggataggcatgccgaatacctcggagaactgtgcccagtcgcccgtagtgttacgtttgtagatgacccaaggtgcagccttggccaacagccccaaatcggacggtgaacccacaaacagcaggtcggtatattcattccaggaatggccggtaatgtccgtctggtggcgcaggatgagttccctgaccggatccacatgcttgcgtggtaccaggtcataatccacccactcctgcagcttgtagaactggcagagcgagaagccccagaatttcgcatcaaggatgtcacccaccagccggttgaaccagggcgactgtatctgttcgttgattttatcgtcgggcttcccgtccacccggaattccatgttggagcacagcacggcattctttcgcttttcgagcacacaggaaaggtgggtatccatcagaatgtcctcgtagaggtcataaagtttgtaacgtcgcgagaaatcgacattctcggccacccttacggctgccatgtagtcggaaatgtccagcccgaagcgtttgggctgtgtgagcacaatcacattcggtctcttttgtcccggcaacgtgaagtttccccctacggtgatgatgccggctttgttgttttttctgtttttctttttcatgatgcttgctttttaccagtggttcgttcgtttgcggttgctttgaatgcggaaatccgacctgcccgccctttgttcctcgggcagcagcggagccccttcgattgaaatgtcctcgtcggccaccgccttcatccattccaccgcccgttcgtaacgatccttgcgtacctgggaaagtttctgcgggttgtggatgcagaagatgtgatagaccgccatgtcgatgaccatcatcagcacgagctggttacggttctcgccggtggctgcaaaaatcttgttgcagtcgtagcgtttgcccagataacaccgcatttcggcaatggccctgtcctcgcaaacctcaatgaccgtttcgtcttcgcgaaccagtgcgtcgaggatgtctcggtggatgctcgcatcgtaatcggtaagttcaacaaatttgctcatagtcctattgttttagagttgtcataatcttttcttattccgttttcttacatccttccgtgatcggaatacgggcggttcaatgcgcctgatcagttcgtcaatgatacggttcgccccttcgaccgcatccggtccgtcggccggatagcgcatggtcagggtgaacaacttgaattgatcctccagttccttcatgtgcggattgtcccgttcagcctcgttgaggatgaggttcccctcgcggttgagcggttcaaggttggcctcgatgcgcgtagccttgtccgtcttcttctcctcgtcgccccggatgaacagcgcaatcttctgttcgcggcgtacttttgccaccagcggtttgaacacctgttggaagaaagggtcctgcagcttgttgttctccatgtagcaatagacattggtcttgcccccgacaaattcaagcatccggacataccagtcaatgaactccgcattgagcgcctgtgccaggaaagtcttgatgacgtaaagcctgccacccaatttgccacagagcgaaaccgtcttgaaggatttgcctttcttacccttgctttcgcccggtgccgggtcgccatacaccacgaggaacttgaatttggagagtgccggaaccttgccgtatgcaatgttttcgaatacctctcccacggaaatcgggttgttgaaatattctccctgtgccgcctttttggatattttggacagtgtgcggtcgatgtcctcttccgagttcttttccggccatgtggaaaaaccgtttttgtcgcggatgttcacgatgtcccaggagtcggccatttcgcccgccctcaccacgcagcagtccttggcgatgatgtttccgcagaagatgaccagtgtaggttcggaaatggaccttgtgggatacagcgcattttcccaccagtcccagcgcttctggatgatgtccgggttcttggtatcctcgtccgtatcaaagtcatcgaccagcagtacgtcgggacgtatggcctcgtttcgcgaaccacgcggagattgtccggcacccagtgcgcggaaagagaccttccctttggtggtgaattcatcctcggtccatgagcccggcagttcctgtttgccgtagtatgccatgatgcgtccgttggcttcgagattggcccggtagggatcgagcaggcgcaccgcattgtccttgctgttggaggtcagaatcacattctttttgcgtccggtaagcgtgagattcatgacgatgaacatggtgacggtggatttggccagctcacggctccaagaaagcacctcaaaccattcatcgtgtgcaatgatccgccggatagcctttttctggaagtcggcaaattcatatttgacataattcggaaaaaagaacttgatccattctatgggatgtttctcaagatattcccggtgtttttcccgttcggctgccgtcatgttcctatcgaccggtgtagcccttgcgatgtcttctttgtacttctcccaatcgaggagagcgagtctgtcagtctgtttcattgtctatccctttataatttgtctttaatgtacgcatcggccaggcgtgtaatttcctttgccttttcgaggtcggccgcccgtacccagtcgatgagcccggtgaggacactgatgatgtcggcaatgcccacttcctgctccatgttgcgtatggccgccgacagtttcccgaggatgtcagcctccttggatgaggggaaccgttccccttcgggccgttcggcgatggccttgtttatttcggccacctgccggtagaggttagccacctgttcctgccttgtgagcgtaagccccaccttctgttcctcccacttcccggcccgtacccagttggacacggacacccgtgacacgcccacccggtcggcgatttcctgctgtgtgaggttttccttgaggtacaaagtttttgcccattcctttttctgggcattcgtcaaatctgccataaatcgtcctttttagttgtaaatcacgttacaaaattgcatgaaaaagcggggtttgtaaaagcgcgtacgcatgatgacgggttacagcgttatgataacgccagaaaacgttatgatgcggacgcggtttcttggtgccatgggaatgttctattttcgcaccatcgaaaggcggggaaaccgctggtaaagacatgacgatgagcagatttttcaatattacaacgagtgacgacggcaccagtacgatattcctgtacggggacatcggagactatacggaggtgcaaagcgggcgcatagcccaggaactgatggaagccgaacgcgtgagccgacgcatccatgtgcgtatcaacagcaacggcggggaagtgtacagcggcattgcgatattcaacgccctgcgccatagccaggccgacatccgcatttatgtggatggcatagccgccagcatggccagtgtgatagccctttgcggcaagcccgtagaaatgagcaaatatgcccgtctgatgctgcacagtgtgagcggcgggtgttacggcaacaagcaggacctgcagcgttgcatggaagagatagaaagcctggaaggcagcttgagtgaaatctatgccgagcggctgggcatgagcaaggaagaagtgaaacagacctattttgacggcgaggaccattggctgaccgccaaggaagccctggaccttggtttcatagacgacatctatgatgcagaccccgtgccggcagacagtacaccggcgcagatatatactttattcaataaccggctcgttgagccacaaaaaaacagagaagacatgaatctggaagacgtaaagaaacgcccgcgcttcaaggactgcgcgagtgatgcggatgtgttccgcctgatggaccaactggaggaagaggcaggcaaggtacctatccttacgaaagagaacaccgacctgaaggccaaggtgaagacctacgaagacaaggctgaagccgaagaccttgccgcccgcaagcagctgcttgacgcagccgagcaggacggtcgcattgatgcgactacccgccccatctacgaaaaccttttggccaatgaccgcgagaacggcgaaaaggccctggcccaactgccggtaaagcgccgtgtgatggaagacctgcatctggaaccgaatggtgaagaaagcccctggaacaggcgtatgcgagaaattaaggacaaacgtaaaaagtgattgaactatggcaataattgtaagaaacacgaattacagcggcgaggtactggaacagttgctgacgcttgccgctacgagcaatgagattgtggaaaaggggctgatcatggtgattcccggtgtggagaagaaaatcagcctgccgcgcctgaagaccggcaagatgctccagaagcgcaaggagaaccccggcgtggaggattcgaagggcaacttcaactacgacgaaaagagtcttgacccggtggacttcatggcctttacggtgtttaacccccgcacgttcgagaacatctggcgcaaatggcagccgaagggcaacctggtattctcggaacttccgcccgaagcgcagaacgccctgcttgccgagttggccaagcgggtacagtttgaactgggtgaccactatgtgaacggtgaatatggggatgatgacgaccacttgtttaacggcatcctgacccagatggccaaggatactgaggtgattgtggtggacagcgcagaatcgaccatgctgggcagactgaaagccatgcgtgcgaagattcccgtggccatccgcaacaacccggacctccgcattctgatgagcgtgaacgactttgacaagtatgatgacgagctgacccagcgcgagtccaagaacacgagcgaaaccgatgtgaatgcccgtcgctacaagggcattaccattgagacgcttgcggcctggcccgatgatctgattgtgtgcaccctctgttcgcccgatgccggcggcaacctgtttgcggctgtgaacctgcaggacgatgaagacgtgattcagattgacaagatctcgaacgcgagcgaactgtacttcttcaagatgctgatgaaggctgacacgaacattgccttcggtgaagaagtggtggtgctggacaagcgaagcaaccccgtgttcaaggcgagcgagaagaagatttcagttgaccctaccagtgtgacccttgaggcaaccggtggcagtgaagaagtgaccgtgaccgccagcggagaatatgagataggcagtgcccctgccggcttcaaggtggaagcgacggataaaggcgtgaagatttcggccggtgcaaacagtggcagtcagaaaaccggtacactgacccttacgctcaatgccgaccgcagcaagacggccaagattaccattacccaaaaccagaaaggataagatggtatggcaaaattgaagtatctggtaattcactgtacggcaaccccggaggggcgtgaggtatcatcggcggacatccggaagtggcacacttcgcccgtaagccagggtggcagaggttggaaacaggtgggctacaccgacctgttccacctgcagggcggtgtggaacgcttggtgaacaacaacgaggatgcgcaggtggatccctgggaagtgaccaacggagccaaggggtacaacagcgtgagccgccacattgtgtatgccggcggtgtggccaaggacggcaagaccccgaaggacacccgcaccggctgccagaaaaaggcactggagaagtatgtgaaggacttccatcgcagattcccggatgtgcgcattgtgggacacaacgagctggcggccaaagcctgccccagtttcgatgtacagaaatggctgaaagaaataggtattaaccaataataaaagaagcaatcaatgaaacgaattatgctgtttatgatgctgatgctgggaacagtatcggctgtgatggcccaaggggccgatgttccggcaacggactatgacgcaatgattggcacctttgccggtttcgtcggcggtgtggtggtgcttactgaagggttgaaaggtttgttccccaacatgaaaggctgggtgacgcagctggtgagctggtgtgtgggcttggtgtgcgcgatgctactgtggtggcttgatgccggatttgtgagtgatgtgagctgggacattgccttgctctatggttttggtgcctcacttgtagccaatggggtagccgacacgggactggtgcaatgggttatcggactattccgaaagaaacgcgaggaagcagaataaaaggttgactgactaaaaaacgggtggtatggactttagcgagatcatgaacattattcttagcggcggccttgtgggcactgcagcagccatcggttccctgcgtgctacggtgaggaaagcgaaagcggaagcgatgaaagccgaagccgacgcagagggtgtgcgtgtggataacgcagaacatgccacccgcgttttggtgagcaatattgtggtacccttaaaagaagaactgaatgcaacaagaaaagacctgcaggccaacaagcgcgaaatggcgcgactgcgcaaggccattgacactgccaacagttgccgccatcatgatgactgtcctgtgcttggcgggctgcgcaagcagcaggaagagcacgacggtggagaagatacagacggaatcggcaagcaccgacagcgcgagcggaagccgacgggcgggactggtgatggcgggtataccggcgagttcggtgaagctgtctatacctgcggacagcctccgtaaacttcctgaaggtgccgtgtaccgtggcaagagcggacaggcgaatctgaccgtaggcagcgacgacagcgggaacatcgtggccgaagcctcgtgtgacagtctgcagcagctggtgctatggtatgaagaagagctggcgcgcatccgtagcgaaaccaagagcgaaatttcaaatgacgttcaaacagtagaaaaacgccctccgaaccggatgcggacgtttatcacaggtgtattggccggcttattggccggtgtgttattaaccatcaaactttataaacgatgaacaagaatttcatgtacggcataggagccgtaaagtataaggatttcacaatcgggtatattgaaaagaactcgtttgacctgggcggcaagaaacccgaggccgcgaagatcgaggccgaacaggtgcagggtgccccggtgctggtcatcccacagagtaacggcggcatcgccccgacgttcaatgtgatccagatgaactattcgaacctgcacaaactgcttggcggcagcctgcattataagaaagaagactcggaaaagaaaactccgatcggctggacagccccgtcggaggtgcttgtcatgcagggaccatgggaactctccctcgtgtccggacagagcgtactgattcccaacgccacgctgctttccaatcctgcaggcaagctgacccttacagaaacctccaagatagaggttacgctcgaagtggcgatgccggaggacggttcgcagccttacggcgtgttcgatacggaagcaataccggacgagtgggggcagtacaagctgccgccggcggaagccgcggctgcagcatcgctccaaagtgaggagggctaacgtatggctgaccgtttggaacaactgatagagatggagtgtgcggacgcgctgcttgacagcggcgtgtccgtacctcttaaaaggtggaagcttccgtggctgaaacgcccggtggaggtgcgtgtgacgatgaagcgtccgaggctgcggggtcagattctgctggcgcgggaatacctgaagacgggtgtcaaacccgattggcaaccgaaggacaagaccgaggaactggcctttgtggcggagcatggtaaggctgtgagccgcctgctggcctatacggtatgccggggatacgtgtcgcggcacgtgggcatcggggtgacagcgtgggtactgcggaactttgtggagtggcgttatctgacggccatgttccgaacattcgagcgtctgatgggcacgaaggattttatgcgtattatcagctcgacagcgcgggcgaacccgatgactccgagactgagccaggcaaggaaggggagttaagaacccggtatgaaggttcccatagccctttcggcttcgtgtggcagattgcatcggcgaccggctggagcgtggattacatccttgatggggtgaattaccagacgctgatcatgatgctgagcgacgcgccgcggtatgtgcggaaaaagcaaggcggcggaaacggtgctcccagaccggaacacagcgccgaggatgaagcgaacgatatagtaggattttttcaaagcaaactggaatgagcaaacctgtagaagttgaatttttgatgaaggacaaactcacgcccggcatgaacaaggccgagcgtgaggcgctggaactgcgtaataccgtcaggctgctggaggctgaactggaaaggctgcgccttgccggggagacggctgcccccaatctggaccagagtgccaatatcgcgcagatccatgcactggagaagcagcttgaggaattgcgcggcaaactgaaactgctgcaggaggaatcggaatccgtgcaggtcacccctgcagatgtacccaacgcgcagcgccagttgggcgggcttcacaacagtatccagcagatcgcccgtgaaatgccttctttggccatgggaccgcagatgttcttcctggcaatcagcaacaacctgccgatttttacggacgaactggcccgtgcccgcaaggaatacgatgagctgcagaagtccggcaagaagggcacaccggtatggaagcaggtcctgtcctcacttttttcctggcagacggccatgaccaccggcatcatgctgctggtaatgtacggtgatgaaatctgggattggacgaaaaacctgttcagtgccaaaaaaggcgtggatgaattcaacatatcactcaaggaaatgaccgagatagagaaggacggccgtgcccagatggtgcgtacccgcttcgaactgaaatcggtcatcgatgaaataaagaacttcaccggcagcaaggaacaggaaaaggcgaaggtggaggaactgaaccgcaagtacggggaatctttcgggtattataaaacactttccgaatggtatgatacccttatccaaaagagcgaggactatgtacaggttctgctgcaccagaccaatgtccagaaccttgtaaaaaaagctgcagaagccgatgaagaggtgaataaaatcaaggcgcagaaaccggaagaggcggaaagcgccatgggttttttcgggaaatggggacaatatatcatgcagtcaagcatggcagaatccgggcagttctatgacgcacaggctgccatcaagaaacatgatcaggaagcttatgacgtactgttgaaaaatgccgaaaacaaacgtgacggttatctgaaaaaagcggaggaagaggtaaagaaagccgcagaagcagccaaaaaaggaaatatcggtgggcatatcgaccccaagcagtccgggaagaatccggaagcggaagccaagcaacggcttgccacagagcgtaggctggcgcaggatcttgccgccctgcaggctgaaaaccggaaggaagagatagaccgcatgcaagccggtaccgagaagaaactggcacaaatcgaatatgactataacgcccggaaagaagagataaaccggcaggaagccgactggaagcgtgagaacaaggaagccggtctttctaccggagataacggacttacccgggagcaacaggatgaacttgaaaaagcccgtgcctcaaacaccgagtcaaggaaaaaagcggaggcggacgtgtacagggaagaggcggaagccatgcgtgactatctgaaggaatacgggaccttccagcagcagaaactggccatcgctgaagaatatgccgagaaaatccgcaaggcacagtcccagggcgaaagactgactttggaaaagcagcgtgatgcggctgtgcacaaagtggacatggaatcccttacccagaagatagactggggagcagcgttcggggatttaaccggcttgcttgcagaccagatgaagaatctgcttggcgaacttaagcagtatgtcaagacggatgagttcaaaaaatcaggagcagcggatcagcaggtcgtttacgatgccattgaacgtattcaaagcatgctccccggtggcaacggcacattggattttgcccggctgcaaacgcagatgcacgctttgggggatgccgtaacacgtgtgcaaaatgcagaactgcagcaggaagcggcattcatccggttgaaagcggcgcaggccgattacaacaaggctcttgaaagcggtaaccaggcagaaatagaacgtacccaaattgctcttcaaacggctcaatcgtccagcgtttcagctgacgaagaatacctgaacgccacctctgaaatgaaggcgcttgccggggaggtgaaaagtgcctcccgggacacggttgacggattgaacatggtatccaacgggttgcacggctttgcgagcggaaccttgcagggatcatttgaaggaatccagaacatgcttaccggtctttcaaaactgaatatcggaggcaaggtcggcgatgccatcagccggatgtccgaaaccctgtcaagtgccggagtcatcgggcagatcatatcggccattctctccatactggatttgctgaaagacggtattggcccgattatctcatcattgatagacaccattttcaatgcgataaccggaatactcgacaatatcctcagcggagacctgttcaaacagataggcggttcccttgtgaaaggtatcgggggattgctgaacacggtgtctttcggaggtttcaacaaactgttcggcatcggcgggaacgccaaggaagtgcaggcggctatagaccgtcttacagaccggaacgagctgctgcagacctcgatagaggatctgaccgacaccatcaagcagagccaggggacgaagagtgtggcggcttaccgcgacgcgtacaagatgcagcaggaaacgaattcgaactacctgcagatggctatggcgcaagccggctaccacggaagtcaccacagctggaactactactggggcggtttcaaccaggcacagatagacaaactgagcggacagatcggccgccagtgggacgggaacctgtggagcctgagcccggaggaaatgaaggcactgcgcagcaacgtggatatgtggacgcaaatccagaataccggtaagggaggctatggcgggcgactgaccgagaaactggatgactacatagaccaggccggcaagctggaggaactgaccgaccagctgtatgaagggctgacgggcatttcgttcgacggtatgtacagcagcttcatcgacaacctgatgaacatgaagtacggtgccaaggatgcggcggaggatatatccgagtacttcatgcgggcgatgctgagcaacaagatcggtgagatgtacagcgacaaactgaaaggctggtgggagaagtttggcaaggccatggaggacaacgaactgaccgaggcggaacggaacgcgctgatggaagagtacatgcagtatatggatgaagcccttgccctgcgtgacaacctggcggcagccaccggttatgacaagacgcagcagggcggtacgagccaaagtgcgaaagcgggcggctttacggccatgacgcaggaccagggcacgaaactggagggcatgttcaccggcgggctgcagcactggagcagcatggacgaccggctggaaagcgtggtggagaagatggacacggctgaagggcatctggcccggatagccgagaacaccggtgtgagcgccggacacctgggcgaactgaaggaagtgataaagaaaatgatacgtgacggactaaaagtgaagtgatatgggcaatatactgagcggactggtgctggtgaacggcacggacatctggacggaatacggcgtgttcctggtggaagaccggcgcgggggcatggagaacctgacggccatcctgaccccgagcaaggccaagaaggatacggctgtggacatacgggaagagcacggggaaaaatacagccccgtgctgaccccacggaatgaagcgcgtgacgtgacgctgcattttgcgctttacaacaagacccaggcaggctggatgaagcagtactttgcctttgtgaatttcctgaagcaagggaaggacggctggctggagatccgtttcccccagctggatctgcagctgcgggtgaagtatgccgactgtacgaagttcaccccgctgacctatctgtggacggaaggtgtgcatgccggaaagttccgggtaaagttccgggaaccgaaaccgattatataaccattcaaacgctattagaatatgcttctaacgatatatgataaagccggaaccaagcgtgcggatgtggccgtgaacgacagctcgacgcaaagcaaggaagtgcagggagacaatgtgctttccctgtcgttcagctattatgccttcctgcccctggacgtgaacgactacacggactatctgggcgaacggtactggctgacagaacgctacacgccgaagcaggtgagcgatggtgaatgggagtataacctgaagctgtacggtatcgagagcctaatcaagcggttcctggtgctggagacgacggacggggacaccaaccccctgtttaccctgacggccacgccccgcgagcatgtggcgatggtggtgaaggctatcaataacggcatgggccacattactgactggaagacgggtacggtggaaggtacggagctgatcacgatagactacgaggggatgtactgcgacgaagcgctgaaagccatcgcggaaaaggcaggcggcaaggtggaatggtgggttgaggggcagactgtgaacgtgtgccgctgcgaacacggggaagaaatcacccttggctatggcaaggggctgacctccctggaaagagatacgagcaacacggccaaattctatacgcgcctgttcccggtaggctcgacccgcaacatcgatgcggagaaatacggcagcccgcgtctgatgcttcccggcggcaggaagtacatcgagcagggcgtggaggaatatggcatctatgaccattacgagcaggatgctttcagcggcatcttcccccgtcgggtcggtacggtgagctcggttcgcagcgaggaggtggcagacgatgaaggaaacaaattcaccgtctattatttccgggacggggaactggactttgaccctaacctgtacgagctggccggagaaaccaaacgtgtgtcgttccagacgggcgaccttgccggactgggagaaagcgatgaccactactttgaggtgaactacgacagcgcggcacgtgaattcgaactgatcaccatctggccctacgatgacgacacccagctgccgggcggcaagctggtgccccgagcaggcgacacctatatcctgtggaatatccggatgccggatgagtattaccggctggccgaagaggagtttgcggttgcggtggacgagtacaaccgggaccactggctggacattgccgcctacaaagccccgacagacccggtatacatcgaggagcacggcatagacctgtttgtgggcagacgggtgaagctggagagccggaagtatttcccggaaaaaggctaccgtcagagccgtatcaccaagatcagccgcaaggtgaacgaacccgggcagatggacatcgagataagcgatgcgctgcaggtgggcaagttcgacaaggtgacggacagcatcggtgcgctgaaaagctatacgaaatcaaagacggaaggcgctgcccttccggacatcatacgaagctgggacaagacgctgcccacggacaacaacctgttttccgcccggcgcagccagaaagagttcctgagcaagaaccagccggacacagccaaagagtccatccgcttcctgaagggtgtgagctttggcgaggctgctggcggcaagccctgcggcatcgtggatggtgagggcaatgccgaatacttgactgccgtgatccgcgaactgctgcgcagcacggagtttgtggacgggctgaccggtgagggctggcagctgtggattgaccagctgaccggactgacaaacctgacggtggacaaagtgactgcccggcaaagcctggtggcgctggaactgctgatcgagaaggtgcgcagcgtgtgcggccagctggtggtgtccgctgccaacggcaagatcaaggacgtggtgaagcagggcgacaactaccgcatcgtgtttgagcaggaatcgggctttgtggcccatgacctgatgcgctgtgcggttacgggtggtaagaaactaaaagcatactgggtggaggtggcttcggtgatagccggcggtgtactggtcccggtaagcgagtttggcggggtgaagccggaggcaggcgatgagtgcgtgctgatgggcaacaccgaaaccccgctccggcagaaccttatatccattgcggccacggaggacggacagccccgtatcgacattctggacggtgtgaaggccaagaacttcaacggctgccttcgttgccggctgggtaagctggacggcatcaggagcagcgctttcccggcagacaaacagccgaaaggaaacggcctgtatgccgacaacgtgtggctgaagggtacgttcgtgttgatgacgggcgaggacatcctgacgcggtttgagataaccgaggggaaaatccattcagccgtggaaagcttgcgcaaggaaatacgcgaagaacagagttatctggacaacagcagttttgccgacggcatggacaaatggaagacgggcagcaaggctacgctgttcaccctgggcggacgctggatctgggcgaacggcggtccttacggtacgaagccggacggccatgccgagatacggaccgacggcaaggtgccttatgcctatatccggaacagctatatcatgcagaaactggaggacttccggctggtaccggagtaccggcagacgaacagccagggcgaacgggtgcccggcgtggtgtatctgtcgttcagctaccgggttatcaaggccggaaggttgaaaatagaatttgtgaacgctgataagaccgggtttgagaacttcaacatgttcggccatgaagaggacctgcccgttggcggtgagaagatgttcacgttggacggactttggaacggcactggcgacttcaagctgtcgtttacgggcgtgatttacatttcgctgctggtgttcagcaccaacaaggcggacgcactggcctataagtaccgtacactgttcgaacagagcgaccggctggtaaagatttcagcggcggtcttcgacaaggacggtaatgcgctgaaagagaccgggcttgtcataaagcctgaaggttccggtctgtatgcgcaggacaatacaggaaagattgcccttatcggggtgagcgtggaggaagaggacgagtacggaaataccgtgagcaaaatcaagctgacagccgaccatatacagctggagggactggtaacggccaacggcaacttcaagatactggaagacggcagcattgaaacgaccaacggtaagtttaccggagagatagacagcagcaaagggaaaatcggcggctttgagatagggaacggccgtatcggttctgtggccgactctcacgggagcggtggcggtcttgccatttatgatgattttttccgtgtcggcggcagcaaaggatatgtgatgttcggtgatgatgtgataccgtcttctgcaggaggagcttttaccgctgtcggtcgtatcgtgaactcagcccccaatatatacgggaattacggcttcgaccaagcgaactatggattgtttatagatgttaccggcggtacgaagaactacggtatcagcagcaatgcggcattacttgccccggcgtttatcaatacgaaagccaagctgcttaccttcggaagtggaaactacacggtggatttctcacaacacaatatcattttgatgtattacaatgaacccaactacagtaaggtagaggttacgctgccgtcggaaagttctgtggcatacaagttcggcatgagttacttgcctaccgattttgcagccattgtcacgttcagggtcagacccggttcaaagaatatcatactaaaaggtatctataaccacaatgaagatttgcaaaactacgagatggcatccggggactccgtaacggtacttattacaaaagcggacggattccgttaccagatattgaatcattcatcctaaaaaacagatatatatgaaaaagttagatttcaggaatttcagcgttcccaccggaataacccgtcagacgagggaggttttcgatgcacgtgagcagatagccgatttgctgtatacgcgtgtcagtggcatcaaggcccatcggcttgcgttcaagattttcgagagtaccggcgagaccgagttcagcgatgaggaaaccgggatgatacacatggcggtggaacgctattgtcttcccaatgtgatagatgccctgaacgaaatcctgggcgggtcagaaaccgataaaaacgaatgagtatggcagaaatgacacaagaagaactggttcaggaagtgctggaccgtgtactccagagttctaccggcgtggaggacttggagaccgtcacctcgctgagcggtgtgaaatcactgcccggggagaaggacggcaagatggtgaacgtccccctggaactgatagggaagcctgcgagcgatgccgccgcccgtgccgaggctgccgccaagaaagcggaaggagccgtagccggactggaggaaaagacccaggccgccacggaagcggccaccaaggccaacgaagcggcagccaaggcagaaaacgccgctgccaaggtggaacagactacggcagcagccatcggcggggctaccgcacgcttttcctcatggatggaaacaggcaacgttttacctgacaagagtaccaaaccgggcggcagcgtagtgtatgtagcggatgccgggaagttcgcctaccacatggactccaccctgtacggggactgggatgtggcgggtgtgcctcctgccggcatattcatgaatgcggaccggacagccatcctgccggacaagctctacctgctgggtgatgccgtatataccggaacaggcggcagcctgagactgctggcctaccggcatgaggtgatgagcggggaagcttacgaggcgctgcaggacaaggatgcgaatacgctgtatctgatttatgaggaggattgacgatgataaccataggcggtaaggaaataacggctgcgtatgtggggaaacgtgccctgtcggcagtctatgccggggcaagactggtgtggtctgcgataagcagctgtttcggacttggatactggaaaggcgacgagccgtggaacggatcggacgcatggaacggtagcagtaaaactgataaatgaatgattattataaaaggacagtattatggcaaaaaggaaaataagcggaatcatcaacgcgactgaacatccgatgaatcttgaaacaccatggaatcagaaacagccggacggcacctatcatgcctatgcaggcgatgacatcgaagcgttcctgaagaaggaactgtcaaaccgtacccctaccgaggaactggtgagcggcgagacgaaacctcctacatccggaacggtgttcgatgcgatggtgggtacggtgacggacgtggatgtgcaggacagcgaggacggcacccagtacgtgatgaccgtcaagcagaaggacaaccagggcggcgagagctcgaaggaagtgcgcttttccaagtacacggacgatgacaaggtggtggtgaacatcgacctgacggacagcggcggtgcgggacttcccgcctcgcagtatctggcactgggcagcggctttgtggtgaaatactccgtaggtgtgggcactgccggtggcggtacggtggacggctacagcgacctgaaagcccgcgtgatcgtgaaacgcggttcgaccgtcatcagtgagttccgggatgcggagtttgtgggcgttacagccggacagagctatacctttgacgcttcgccctacctgaaggatgccactgcctataccgtacaggtggaagcgcaggcaacttaccaggacggcacgctgatgaagacggccacggccaaggtgaccatggtggccatggagctggagaccacctactcggcgggcaacgggctggccgacgggggatataaaaatgacgtgaacatcccctttactgccaagggcacgagcggtgagaagaacatctactaccgcgtgaacggcggacaggcctttaccctcggtctttcggccggcagcggtgtgcagcagaagaacgtgaccatccccctgacacagatgcaggagggtacgaacgtggtggaagcctacgcgcagcatgagaactccggtgtggtgagccgggtgcattacattacgctgctgaaggcaggcggaggtgtgacagcgtatgccggcctgatgttcagccaccgggcagcggggttccagcgtgactggaaacacccggtgctggaggcagagcagttcacggcatggaacttcacgtatgccggctatgaccgcgatgcgtatacggcccgtgtgaaagtgaccgaccggggcagcgtggtgaaggaagacctgctgcaacgcggtgagaccggcagctacggacggacgaacgtgaacgtggaaccgttggactaccgtgtgtcatgcggcgatgccgtgcttgaggtgcaggtgaacaccacatcgcacccggacattgaagccacgctggcaccggatgccgtgtgtacgtttgacgccttcgggcgaagcaacacggaaaacaacccggcaagctgggtgagcggtgacaagcgtatggagttccgggacgtgctgtggagcgtgaacgaatatggtgccggtagcggctggcacaaggaccgcctgctgctggccggtggtgcaggtatgaccctgaccgctgacggcggttaccgccccttcaacgaggcggacaagcccgagggatttgccatccgtgacgtgggcatgacgctggagatagaatacagcacggccaacgtgacggatacggatgccgagctgatcacctgcctggggcagctggacaacggcaaccggtacgggctgattgtgactccggaagaggccaagttcctgaccggtgtggtgaccgaggcgatggatgccggacaggtgctgcgctatgaagactcggtgggtaccaagttccagccgggtacgaatatccgcattacctacgtgttctatccgaacgtgcagaccaacgaacagcgcacgctgatcggtttctatgtgaacggtgaagagtcggctgcttccaagtggctcgacaaggtgaattttgacattcagagccagttggaatttaagtcggcaggtgccgacttgaacgtgaagagcgtgcgtatctataacaaggcgctgacctcggacgaggtgctgaacaactacatcgtggaccgcaaccacctggaggatgccgacggggaaccgggcgtgcgctcactggatgaggacaaccgcgtgctgaatgaaggagatacggtgagcatggagaagctgatggggctgatgaagaagcgccggaactcgatcctggtactgataggcacgggcagcgtgggcagtgaggttccgagcgagagcgacacgctgaacgtggtggatgcactggcccagctgaacgacaagaaggccaataaactggtaagggaggtccgtttctataacggagaggacaggacgcttgactttatccttaccaacgtatatgtccgtattcagggtacttcttccgtgaactatgccagaaagaacttccgtttctacttccagaagacggcaagcggctggacggttacattgagctacggggagattgacggaaacggcaggcagaagaatccggtggtaactaccggcaaaaaaaatctcttcaagttacgcaggaactcggtaggcgcgaagctggcatgttccaaatgcgacttctcggactcgtccatgaccaccaataccggaggtgcgaagcttatcaatgacggactgaaagagatggggctgcttacgcctgcccagcgttacgccaaagaccatgggctggaggatgattaccgttcggccatcgacggcctgccgtgcgacctgttcgtagcgaagagtgccgacgaagacctgacctattacggccagtacaacatgaacaacgagaagagcgacagctaccccatcttcgggcaggatgagaccatcggcggcgagaaatggggcgagggcgacacgctgaactacctggaagccgacgaggaaggacacaagcagtacctgcccgtctgcttcgagacgctgaacaactccaatccgctgtgcctgttccactggttgccgagtaccgaaccggagcataaggatttcatggactacaactttgacggaggactggaatttaatcatccgaaagataccttctggtcggacggaggcggtgacgcggaggaagaaccgaacctgaaagaccacctcggtaccggtgacaagtacgacaagatgtacaaggccaccgaccgcatgatgagtttcgtctaccggtgcgtaaaggaaacgcctgcgggcaggaacatggtttacagcacggaatcccattcgttcgagggggtggactatgaggacgacggcgacaagttccctaccgccaagtggcagagcgatacgttcaggaaagaggccgggaagtatttcgaccttccccacctgattgcctactatctgtacgtgcagttcaacctcggcgtggaccagcttgcgaagaacatgcttatccgcacatgggacggtgtgaaatggtcgattgactattatgacggcgactgccagctcggttctgacaacaagtcgttcctgaccgggaagtatgacgacaaccgccagacgaagcgcgacggggcttatgtgatgcagggtcataactcgtggctgtggaacctcatcgtggccaattgctgggacatgattgtggagattatggtgagcggatggaacgggggcgcaagcttcatgagtgccttcagtatccagaaagccattgaccatttcgataccgaacagatgaagaagtggtgctcacgcctctataacaagtccggcatcttcaaatacatctacccgttcctgaacgaaatgccggtgggtgctgacggtgccaaacagacctatccgcaaatctacggtctgaagggttcgttgaaagcacaccggaactacttcatccaacgccggtatgacctgaagcaggtggagtacggctatgtatccacgctgggtgcccagttctaccagagtacggcatcgctggacaaggcttataaactgaaaccgatgcagtaccggctgaccatcccgtaccgtgtgcagctctccaccagcaacggcgtgcaggccgacagcggcgtggtggatgcggacgtgctccattccctgcagctgacccgtgccttcggtgagaacgacccgctgaagattatcggtgcagccaaaatcaaggagctggtatggcacgaggatgcgttcgcaatcggcttcaacttcggtctgctgacctcactggtaaaactcgacatgagcgtggagaaagccagcggttaccggaacggctcgttcatggcttcgaccaatggtatgctgcttctggaagaagtgaacatgcggaacaaccggctggcccggaacggggacaacgggaatgtggccactttggacttgagctggcagggccgcctgaagaaactggacgtgaggggtacggggctgacccgtgtgaaactggccaccggtgcgcccgttgtgcagttatgcctgccggacacgattgaggaactgttcctggaatatctgaccaagctgtccgatagtggcctgatactggaagggatcaataatgtgcggggctaccgctacaccaactgccccggcatcgacgggttcgctatgctggaacgcctgcaccaggccagactgaacggcagcggcaagctggagcgcttcgtgctggagatagaccgggaagacgacggaaccctgctgaagaagtattacgactacggaacgtatacacagacgggtgccgtggatgaccggcattcgggactgaggggcaaactgaccctgacgaagtatctggccgatgaggaactggagaagtatgccgcccgttatccggaactgaccatcaagcagccgccctatacgatgatcgagtttgacgacagcgtggccgacgatgccaatgtttcgaacctggacaacaagacggggtacaaattcggcaatacgtacaaaatgagcgggcatgtgaatgccatcctgtccaagcgccaccgcgtattggccaaggtgacgaagatgcccacgagccggaaggtggagatagccgggcagcaggtggaagtgaacaacccggacggggagatgacctatttccccctgcatgacgaaagctcgaacttctatgccgatgcggaggatatgaacgattgcacggtggcgaagctggacggcagcgagggagactggatgatgtatgagccgttttactggagcaaaggcatcaacgattatttgaacaacaagaagtacgcctgctacagcagttatccggaggacgaaatgcccccgattccggacgcgacggtactgacactggatgccatcaaggagacacagggcggctggctgggtgaacgcaagatcatgagcggcaagcccacgctgatggaatcctatacgacggacaaggcttattccgtgtgcaaagtggacgtgtcgggttacagacgtgtccgcttcccgagcgttccaggaacagggcttatcggcagtgtgtttgctgatgcggagggaaacatcctgaagagtattgtggtgccgaccatcggcttgaaatttgaagccggcatgtatctgatagcagacgttccggaacgtgctacagccctgcatttctccattctgaacacggcagagtttgactgcgtggtgctgagcaacagcgacaagatagaggacatggaaccggattgggtggccaatgaggaacatctgtgtgccgttgtgggcagttctgtagtgggcagcaagttgcgtgcctgcataaccggagcttcgaccacggcaagcatgacatggacggacttccactattacagccagcagcgtggcatgcagcagatagatgccctgatgcacagccgcatcgcgaacctgagctatgcaaagtacgggcgtagggacatgcaggaacaatgcggtgccggtcagcataacaataaccggacaacgggtggaacggccgaccatggaatgacagacaccatcggctatgacgaagcgtatgtcatcaacaacaaaatcacgaattcgctgattgacggcttggtgcatcagtatgcctggtataagagccgggacgaatacggacaggcgaccgtggtgcaggtgaacaatatctgctgcctgggctacgaggacatctacggcaacaagtatgacatgatggacggcgtggatctgccgaatgacagcggcaaccagggcaaatggcgcatctggatgcctgacggcagtatccgtatggtacagggcaagaaggacagcggtcagtggattacaggcgtggcgcacggcaagtatatggacatggttccggtaggtaatttgaacggatcatcttccacctactataccgacatgtactggataagcaccgctacagtccgtgtggtctatcgcgggtacgaccatgcgtatgcgtatggcggtgtgtcgagtgcgaatgcgaatagcgatgcttcgagtacgaatgcgaatgtcggctcgcgtctggccttccgcggcaaaatcgtccgggcgcaaagcgtggcagcgtacaaggcgatacgcgaggtggcgtaagcgcaaagcgccaaagcgtggagcgaagcgactaaaacgaaagaacgggattcggatggtttccgaattccatttaaaaggtattcaaataccggcgaagccggtcgaaaaaatagaattttgaggtatatgaaaaagattatcgcattttttaaaatgagtaaccgttacaagcatcttatcggtggtttgatggtaggtctattgggatttactccttggacggccttttatgctgcggccattgcagcttcctgtctggaactgaaagatactcttcggggaagtccttgggactggattgattgggggctcaccgtcgcgggtggcagtatatccgttttattttggatgatagtgtaattcgtttatctgttttgcctgttaaatcagtaactttgcaagcggtagagttccccaatagtccgtgtggtctatcgcgggtacaacaatgcgaatgcgaatggcggtgtgtcgaatgcgaatgcgaataacgatgcttcgaatacgaatgcgaatgtcggctcgcgtctggaaatctaacaaatcggcgtacagcagcggggacgtgtccccgaagcggtgccgaggggagcaagccacagcaacagcaccagaaaaggtggaaagctgaaaaatcacgcgtcgggtggagtttggtaggctgttatcagttcgaagaagtcagacccggggaaaggaaggccctcatcttccatgtttattaaccaatagcttatgcgcagggaaggatatattatcgaggaaatcatcgaatactccaatatgtcggaggcattcgattcggtacttcgcggaaccgatcgtaagaggtcaaggcagggacgattcctgcttgcccatagggagaagattatcaccgaactgacggcttccattgcggacggctcattccggctgggcggctaccatgagagggaaattgaagaatacggtaaaaaacgtattttgcagatcctgtccatgaaagaccgcatcgctgtgtttgccatcatgaatgtggtggaccgccacctgcaaaaacgttatatccggacaaccggtgcaagcatcaaaaggcgcggtactcatgacctgatgaactgcatacgtaccgatttgcaaaaaaatccggaaggcacgctttacgcatacaaatttgacatccggaggttttatgacaatgcgcggcaggactttgttatgtggtgcttccggagggtgttcaaggacaaaaggctgttggtcttgttggagcggtttgttaagctgctgccagaaggtatcagtttcggactgcgcagttcacaaggggcaggaaatctgcttctgtctgtatttttagaccactatctgaaggataagtacggggttcgttattactatcgctattgcgatgacggactggtactcggtaaaacgaaagcggaattgtggaagattcgtgatgctgttcacgggcaaatgggaaaaatagacttggaaataaagccgaatgaacgggtgttccctgtggaagaaggcattgatttccttggctatgttatccgtcccgactatgtaagattgcggaaacgcatcaaacagaagtttgcccggaaaatgcacgaggtaaaatcgagaaaaagacggcgggaactgattgccagtttctacggcatgacgaagcacgccgactgtaataagttgtttaaaaaattaacaggcaaagaaatgagaagttttaaagacttgaatgtcgcttacaagccggaagacggtaaaaagcgattccccggagtggtggtaagcatccgggaactggtaaacttacccattgtagtgaaggactttgagaccggtatcaaaaccgagcagggagaagaccgctgtattgtggccatcgaagtgaacggcgaggcaaagaagttcttcaccaacagcgaggaaatgaagaatattctcgcacaagtaaaggaaatgccggatggtttcccgtttgaaacgaccatcaagacagagacattcggcaaaggtagaaccaaatacgtgtttacatgagaagagttgaaggaagttccggggtttcgctgatggaatgcacgaacccggttaaagacaaatggcgcatccgatgggatgtgcaggaaaaagagaacggctctgcctcctacatggaagaggagttcgggcataagcctactgatgaggaaatccacacattggttatgtcctggtataacagccagactgatgcggctatcctatccggattcgcctataatggtgcccatgtatggctttctgtggagaaccagtacaactataaggcagcatacgatttggccgttcagacgggcggagaaaccctgccagtgacgtttaagtttggttcggatgaacaaccggaataccatacttttactcagttagaagaactgaaagatttctatacaaaagcagtaggattcattcagacagttctggctgaaggctgggaaaaaaaggacaagttcaatttggaattatatcggattgagtgattgacaatcccttcgggggagggataaaaaaagcccccggcctgttaatatagacgccaatcatttattaacacaaaacgccacgagagtgcgcgaccgggggcaatgccctctgccgcactctcgtggcgtttttacgcattaaataaatgattggcattgcaaaagtacaaaaatgattggatatgacattgtttgaagcacttaaatttaacagagaaccgcttgaaatgcttataagtttgggcggcaagcaggatgaccttcgattcatagacttatatacggagtatgaggtcatgaaaaaacaaggtgaaaagaccacttatgcagtggcgtttttggcaaataaatattcggtaagcgaacgtaaggtgtatgatgttatcaaacggtttggaaagcactgcacgctcggtgcagtgtgattgatgtgccggggatgccttgtgttgtccggtagagctacctttgtacaaccaaaaataaagctcatgaataagtattaccagacattagacaagatactccaaacgggcaaaatccagaccaataggaaagggcgtatcaagtatctattaaacgaaaggctcatgctaacccccgctgatttacttgacatatttgaaagccacgggatagccaggaaaaagctgaaagaggaattgaaactgtttatgcaaggagtccgggatgtggaaaaatacaaagaggcagggattacctggtgggattattgcggccatacccttgtaaacagctatccaacttactttgaaaagcttccacccctcataaccaggattaaccgggaaaagcgcaacagcaagaattatgtcctgtttcttggagaaaccggggtggaaagcaaccaggcaccctgcctgagtcttgtgcagttccaaattgatgagggagaattggtgctatctgcatatcagcgtagttctgatgcgaaccttgggcttccggctgatatttatcatctttatctgatggcaaggcaggtggagcttcccctgaagtccataacccttgaccttggaaatgtgcatatatatgaaaataacattgaccggactctggaactgttatccggagttgaaaacattaaatttgacttgaacgtatgaagaatatgaatttatctgcaccactgccatttgtaggccaaaaaagaatgtttgctaaagagtttattaaagttttggaacagttccctgaagataccgtgtttgtggacttgtttggcggttccggacttctttcgcatatagccaaaagaagcaagcccgatgctactgttgtctacaatgacttcgacaactaccggttcagactgaaaaatatcccacagacaaataaactgcttgccgatattagggagctggtgggtaattcgatacccaaacataaaccaattaaaggggaacttagagaacgcatttttaaacgtatcgaggaagaagaactaaatgttgggtacgtggattttataaccttatcatcctcacttatgttctccatgaagtataaattgtctgtagccgaaatgcgcaaggaagtcctttataacaacattcgcaagaccggttatccggagtcttctgactacttaaaagggcttgaaattgtatcatgcgactacaaagcagtattcaaccaatataaggatgttcccggagtcgtctttttaattgatccgccttatctttccactgatgttggtacgtacaatatgtattggcgcttgtctgattatttggatgttttaaagatactcgaaaagcattccttcgtttatttcacatccaataaatcctccatacttgaactgtgtgaatggattggagcaaacaaaaccattggcaatccttttgagggttgtacaaaaaaggaattcaatgcccacatgaattattctgccgaatatacagacatgatgctgtataagaaacaggaaaaattagttcataaaacagctgcttagcactgaacaaagatacaatttttcaagtagaaggccaaacttttgagccttattttaatgccgttataaagccattttttatgaaattataaagccgaaacagaggtcattacaaaacttttgtttcggctttttgagtgttgcgcgctttccttttttgaacgcttcgttttgtccttttccctgaaaatcgaacgcttcgtttcggattctgcggaaatttggatttgcggattatacatacatcggtgttccgtccaatacatctccactctccaccgcttcaatataggcagaaaggctcagtgcatcaggagccagcaacagactaccccgatagaaacaggcaaaggtataaagggcagactccgtgatacccgtcaactgggtaagcagcgtgttacggggcagcacatatttagaaaacctccttgctttgggatacaacgaattatttgaaaccaccttcggcataagcggagcatcctcttccttgggagtactgtaaagcaaagactgcaagcagcgttccgctgccagctcatccttgaggggaatacacatcacggcgcaaggcagcttgtccaacgtgtctttcgactggaacaagcaagacatcacgttctcccccgcatgctcattcaagtaagcaatccactcttcgtcgcgctgcttgatatagtctgaataggtggccttggcatactcctgactggcagtgaagccaaaccaggcatctctgtcagacattgcccagcgatcgtaaaagaaagtggaagacggaagcagagacccggaaaatccgtcctctaccggctgctgtacccgcaaggcattgataaacgtctgtgtggaatccgatccgtggctgacgccggaacaatagatggcatcttcattgaacttcatgtcaaactccgcccaactgcccagctgcgtctgcgaacgaataccgtccgtagttttccccatacccactcctttcatacgcacatagactgtggcagctacattgttgtgtttgcccgcgtgcatagtacggaaagaagggaggttcatcagggactttttgctgcgccgcgcatcaatcacatgttctatcaaacgcttctggaaacttacaaccagaaaatcgggagtgaagtaggcagccagaaaacgaccgtctgccatgggatagatacgtatctcctctcccttgtaatcgaaatacttggaagggaacgaactggagcagtacttctccacaaaagactccactaactcataatcacccgaacccaaactgcaatacaatacttggttcatcggtgtatctggctcgtgaaagctaatcagcatcttgttcatctgtttactcagtccatgtggagtatcttccaccaaagtatacaaatacttcttcaagtaaacaaaaagctccgatacgtatagaaaatgattgtctttgctgcaattcaactcattgatatcttccacgaggtctgccatacggtcggtttcgagtatggctgtggcatcttgcggcaccaaagtataaagattgaaatcctgccggttctccaccgaattcaaccgcaggaaagaatacacgccaaagccggtacatagcagcactatggacacaacgacagctatctgtatgaggagtcggagtttcatggcatttattcatcaacttttggcaaaaataacattttctactaataaaacaaaacaaatgtttcaaaaagtttagaaatctatttcaagtccatcgtaggcaaagtgtacatggggtggcagccgcttttcgatgtcagtatgaagccctgcatgatggctcatatggataaaataggtctctttggcaccaatacgtccggcagcctccaacgcctccgaaatactctggtgcgtaggatgcggctttggccgtaaagcattcattaccaaaacgtccaagcctttcaattgttcataagattcctcaggcattgtgtgcatatccgtgatatatcccaagcggccgccaatgcggtagcccaggatgggaagcctgccgtgcatcacccgtaaaggcagcacctccgtcctgttgatgtgaaacacttgccccgcctccacttcctgcagataaatacgcggaactcccggatatactttatcgacaaaacagtaaggcatccttgtccgcagatgggcagcagtgtaggcatcggagtagataggaatatcggcaaaacgaccgaacgggcgcaaatcatccagaccgcccacatggtcataatgttcgtgtgtcaccagtacgccgtctatcttctcaaaagaagaggcgcacagcatctgttccctgaagtcaggaccacaatctatcaatatcaccgcatcatccgtatgcagcagggatgacgcacgcaagcggttgtcccgcgggtcagtggaagtacagaccggacaagtacagcctatctcaggcacaccggtcgaagtcccgcttcctaatattctgagtttccccattgactaaatcaaataaatttctaaaatcaggttatatacaacgatgtttgggtgtgtcaaaactctcttactattttatcaaacaaacttccgggtgaatatcaatgccgaatttctcgcggacagaagcgcgcacggcatccgaaagagcgacaatatccgctcccgtggcaccacccgaattcaccaataccaacgcctgccgatcgtgcaccgcagcaggccccagcgctttacctttccagccacaccggtctatcatccaggcagccggtatctttacccggccggcatccacatcatagtggggcatgtccggatattcccgttgcaaggactccaactgccgacgcggcacaatggggttcataaaaaaactacccgcattgcccagcaccttcggatcgggcaatttgctttgacggatgtctataatcacccggcgcaaagtttccaaattcagcaccggatatttctccagctcctgccggatagtaccgtaacccaatgtataatgttcccgtttacccaggcagaagttcacataagtcacaaacacggtcttcatctccggttgcttaaacaagctctttctgtaagagtagccgcactcgtccactccgtagatacgcttctcccctgccatgtttatggtttccacggatgttatcaggtcctttacttccacaccataggcaccgatattctgtactgcactcgcccctacctcacccggtatcagcgaaaggttctcggcaccataccaacgccgctccacacagtaggccacaaaatcgtcccatatcacaccggcgcccacacgcaccgacacgtgctcctcatcctctgacgtcacctccaggccaccgatgcgtgaatgcaacaccgtgccttcataatccttgataaagagcaggttgctccctccaccgatatgtagccaaggtgcaacaacatgtcctgccgcaatcaattcccgcagttcatcctccgaaccgtattccagaaatcttgcagcagtaacgtcaattccaaatgtattgggtattttcctcaaacctttcctcctctattttaaatgctcgtgtcttcatatttgtacagctcccatcccttaccgcgtttgcggaaatagaagatattggagtacccgttgcctataccatttaccttcagtatcttggtatccgacaagtcctcattcttctgtccgtaattgatattagacaatctgtcggtaggcattaccggacggaaggcataccactggtccacatccaaagtagtttccaggatagaaaactcgtcatcagggtctatggtgatgaattgtagcggatggctgatatgcttgctttgatagacactgtccctcacaaaacgggtatagaattccacgaagtcctcattttcacctttctccatctcgcgcaggttgatggcctcgagcatccacattccccgcttccgctcaaaataataacgcttcaccatacgcgttttcaagaaaatccactccacttgtaccgatgtcagcgtagtatcacccaccatgtccatatcctcttccttatcaaaaagcaaggtgtaacagttctccttggtaaacagataatcgtgcttccagaagtccgcctctatcttcagcggagtatcacggtcataatagggcaaaggaaataccgtcctctgcctttgcagggcatcatccgaagcataattgaagataaaatcatcaaacagctcgtctgccaccatcggcttcggttcttccttcacttctgcttcctgcagcgtatcggccttgtaaccggccgaatccaccatttccgcaatggtagcaaagggatccattttcgcctttttgtttccacacgaaatcaaaaaggcgagtaacaaaaatcccaataaaagttttttcattctttgcggaccgcttacggtcacctatttaatttagccttcaatttctcaagcatgtctacggtcatggactccaagtcatactgcggcatccagtcccattcctcgcgtgcacaagagtcatccagagagtcgggccagctatcagcaatggcctgcttcagcggatcaatctcgtataccatctcaaaatcaggcacatgcttcttgatttcctgataaatctgttcagggtcaaaactcatggaggcgatgttgaaggcgttgcggtgcttcagccttgccggtgccgcttccatcagtgagatggccgcattcagtgcatcaggcatatacatcatatccatatacgtaccggccttcaccggacatacgaatttttctcccttcacggcagagtagaaaatatctaccgcatagtccgtagtgccgccacccggaggggtcacgttcgaaatgattcccggaaaacgtaccgagcgtgtatccacaccatattttgtatagtaatagtcactcaacaattcagtcgtcactttagtcacgccatacatggtacgcggacgctggatagtgtcctgtggtgtcttcacgtgaggcgtagcttcgccgaacgaaccgatggaactcggggtaaacacggcacaattgtactcgcgcgccacttcaagtacattccacaacccgtcgataccgattttccaagccatggccggacggctttcggcaactaccgagagcaaggcagccaggttgtagattgtatcaatcttgaactgacgcgccaccacctcgatggactgacggtctgtcacatcggcaatagccgaaggaccggatgctttcaattctcccttgggcatagcactcggaatgtatcctgccacaacatggtcatcgccataacgtttgcgcaactccagtgtgagttccgatccaatctgtccggtagctccaattaccaaaatattcttcatacgagttatttataaggtttcgttattatatatggtgcaaatatacacacttttttttcatatttctgccatattgttattgtttattccaagaaaaatgatgttctttgtgggaaatgtaacgacaacgtattacctaaaaaataaaaatgctatgtacggtaaaatgaaagaccatctcagcaagactattgctgaaataaaagaagccggactctacaaggaagagcgactgattgagagtgcacaacaagctgccatcaccgtaaaaggcaaagaggtactgaacttctgtgccaacaactacctgggactgtccaaccacccgcggctgattgccgccgcccagcagattatggaacaccgcggatacggcatgtcgtccgtacgtttcatctgcggaacgcaggacatccacaaggagcttgaagcagccatctccgactacttcaagactgaagacaccattctctatgccgcttgcttcgacgccaatggcggggtatttgaacccctcttcaccgaagaagacgctatcatctcggactccctgaaccatgcttccatcattgacggcgtacgcctctgcaaagccaaacgctatcgctacgccaatgccgacatggccgacctggaaaaatgcctgcaggaagcccaagcacagcgtttccgtatcattgttacggacggggtattctccatggacggcaacgttgccccgatggaccgaatttgcgaccttgccgagaaatacgacgcgctagtcatggtggacgaatcacactctgccggtgtggtaggccccacgggacacggcgtaagcgaacaatatggcacctacggacgcgtagacatctacactggaactttgggcaaagcctttggcggcgctttgggaggattcactaccggacgtaaggaaatcattgacctgctgcgccaacgcagccgtccgtacctcttttccaattcattggcgccaggtatcatcggcgccagtctcgaggtattcaagatgcttaaagagagtaataccctgcatgacaaactgctggaaaacgtgaattacttccgcgacaaaatgactgccgctggcttcgacatcaagccgacacagagcgccatctgcgccgtcatgctgtatgatgccaaactttcccagatttatgccgcccgcatgcaagaagaaggtatctacgttaccggcttctactaccccgtagtgcccaaagaccaggcacgcatccgcgtacaaatttctgccggacacgaaaaggaacatctggacaaatgtattgccgcatttattaaggtggggaaagagcttggagtgctgaagtgaattataagttataaccaaacaaaaaaatcccacgactgattagccgcgggattttttgttgtttcttatttgcgttctcccaactttgcatcaacaaagaagattccggtagtaccagctttcttcaccatatccacaatgccagcagcagtagcttcttcttctacctgctcacgtacaaatccccaaaggaaatcttgtgtagccttatctttttctgcagcagcaacatccaccaatgcatcaatcatctttgaaacacggcattcgtgttcataaacctgctcgaatacttccaacggagtaccaaaatcattgggaacaacatcaatcttatccaatttagccttaccgccacgcttgatgatataagaagccatttcgcaagcatgagctttttcttcagaagcctgcttcttcaaccaagcagctataccgttataaccttctttctccatatagaaagacatcgctaaataaagattggaagaccacatctcagccgtaatctgctcattaattgcattctgtaatttttctgtaatcataatcgtatttattaaaattgaaatcattacaaaagtaacaagaaaccttaaaagttgttcacacaataacattttttatacaaaagcaaaggtcttggaatgcttcgtcatccatgcaacacgtctccagccgctctataccagctcgtccgatgtatatccttgaggaagctcacggcagttatagcccgaagccataatttcaccataagcccctgccgaacggagggcgataaggtcaccacgcttcacgccattcaaatcaatagccttaccaaatacatcggaagactcgcagatgggtcctactacatcataagcctgaaccggcgcatccgaagtgatattctctattttatggaacgcttggtagagtgccggacgaatcaaatccgtcatgccagcatccaagatggcaaactgcttgttggtaccctgcttcacataaagtacctgcgaaatcaatgaaccacattgtcccactaccgcacgtcccagctcaaagtgaagcgtctgatggggacgaagtttcaaatggctgctgtaagtctcgaagtagcttttaaagtcaggtatcggctgacggttggggtgaccatagtcaattccgagccccccccccacattgacgtgctcaatgcggatatgacgggcttccaacttatcttgtaattcgttgacacggttacacaaagccacgaaatcacccatatccaatatctgggaaccgatatggaaatgcagtccgatgagtctcagattcttcatattctgcgcaatgtctatcacacggtccatatcctgcatactgataccgaacttattttcggccagcccagtggtaatattggcatgggtatgggcacctacattgggattgatacggaaagccacattggctaccttacctttagcggcagccagctcattgataatttccagctcagggacagactccacattaaagcagaaaatatcataatccagccccagattaatttcccaatcagccttacccaccccggcaaaaacaatcttgccagtgggaaaaccggctttgatggcagcacggatctcaccgccacttacacagtcggcacccaaaccattctcgcggataatggcaagcactttgggattggcgttggccttcacggcataatgcactgaataattaccatacttcgccgcctccgtacgaatgcagtcaagcgtatcacgcaaaacctttgtatcgtagtaatagaagggagtacgcaattcgcggaatttattgatgggaaatgttcctttcatataatagctgtaatctttgtttagttttaaaaaaggaaatgaaagaagtgtttgcaactctttttaggcacggattacgcggattgcacggattctttttgttttttatctgtacaatccgcgtaatctacaccctaaaaaaatatttattcgccgttaaacagcgcattgctgagtgactgcaacgccactttcttgtcacactctcggatgaggaaagaaatattatagttgctaccaccgaaagaaatcatacgtaccggtatgtcgcgcatggcatccaatgccttggcttcgaaaccgacgttctcccattcgagatcgcccaccacacagatgatacacatgtccttgtccaccgtcactgtaccatacttcttcaagtcatccagaatttcattaagatgcttcacattgtcgatagatacggacacacccacttctgaggtacaaatcatatcaatggaagtctggtagctctcgaatatctcgaaaaccttacgcaagaatccgtgagcaagcaacatgcggctggactttatcttgatagccgtaatgttgtccttggcagccaccgccttaatcttacccttctccgtatcgttagaaatcagtgtacccggagcagtggggtccatcgtattgagcagacggacgggaatattggcatacttggcaggctgaatgcaggtggggtgcagaatcttggcaccaaaatatgccagctctgcggcctcttcgaagtgcagatgacgcaccggcgcagttttgtccacaatacggggatcattgttgtgcatgccgtcgatatccgtccaaatctgaatttcagaagcgttgatggcagcaccgatcagcgaagccgtatagtcgcttccgccacgctgcagattgtctatctctccgtaggcgttacggcagatatacccctgagtaatataaatctcagcatccggatgtaattccagctgaatctgaagcttatccttgatatagaccggatcgggttcggcattcttatccgtacgcatgtattctaaagccggaagcaacacagacttcacaccgcattcctgcagatagtaattcatcatggcggtggaaatcaactcgccctgagccaacaccaccttctcctcaaacagagtgaagaggtctttggtataagaacggatatagtcaaaatgagatttgatgagctccaagcctttctgtttatactccggagtagcaaaaagttcatcaatgtgctggcgatatttactttccagcttgttgataatctcgttggcaccttccggattcttcttgtacagatagtccgaaatctcaaccaatgtgtttgtggtacccgacatggcagagagaaccacaatcttacgttcaccatcggtaatcaatttggccacttccttcattcgctgagccgaacctactgaagtacctccaaactttaaaactttcattttcgtttctgtattaattagtttatagttacaagctacgagctacaagtaggcagctacggagctctatcgttaatttctgttctttataagaatcagtagtcagagataactactaatcattggttattgtaggggcgtattctgctgtaacatcagtcatcagatggtctgcgcaccggtacaccttgccgggaaactctcgcagcagctgcaggttgtgcgtggtcatcaccaccagtgcgccggcttcactgatgccgtgcagaagttctgcaatggcatgtccggtttccgaatccaggtttccggtaggctcatccgcaaggattatctccggagagttgagcactgcacgcgcaatcacaatgcgctgttgctcaccacccgacagttcattgggcaacttataccctttgttgctcatccccaccaggttcagcacctcttctattttgtccttaatctcccctttgctcttccaaccggtagcacggagaacaaattcaagattgtcgtacaccgtacggtctgtcagcaactggaagtcctggaatacgattcccagtttgcggcgcaactgtgggatgtgcttacgcttaatatggagcatgtcataccccaatacctcagccttgcccgatgcaatatccaattcaccatagaaagtcttgagcaggctcgtcttgccagaacccactttacctaccaagtacacgaactcccctttgtgaagttccaaattcacaccgttcagtacgcacaactcctgctggtgtatctctacgtccgtatatcttatcagcgcctcgcccacccctattttaatttttaattgttaatttttaattgtttagtgtttcttccacgtcgcactgtgacgttcctccaattcacgcgcaaggtcttcaatgcggtatcctttggatgtgagtagcacgatgaggtgatacaacaaatcagctccttcataaatcaggcgttcgtccgtaccgttgcaagcctcaatgacagtttccacagcctcttcgcctaccttctgtgccattttgttgacaccggactggaaaagactagtcgtataggaaccttcgggcatctcatcataacgcttacagataaaatcctgaagaagcttcaagaacataacaggttgttcgttcttctcaccccagcaagtatctgcaccggtatggcaaaccgagcctacgggatgtacctgcaccagtaacgtatcccggtcacagtcttccttcatggaaaccacattcaggaagttaccactctcctcgcctttcgtccaaagacggttcttggtacgactgaagaaagtcacctttccggtttccaccgtcttgtcataagcctccttattcatgaagccaagcatcagcaccttagcggtatctgcatcttgtataatcgccggaacaagtccgttcatcttgtcaaaatccattttatttacgatttagctatttactatttacgattgaattattttaagtgactggagacttatgatttgcttgagtaatcccaatcgtaaatcgtaaatcgtccaatcgtaaactcaccttcatcctctcatcgcaattccttgggcacaaaggtacgattttaattcgggaattttgatttctccgaaatgaaaaacactggctgccagagcagcatctgcttttccctgcaaaaagacatcacgaaaatgctctttgacacctgctccccccgatgcaatgatagggatggacaaattgtcggcaaggctggaaagcgcttcattggcataaccagtcttgacaccgtcgtgattcatgctagtgaacaatatctcgcccgcaccacgttcctgggcttcttttgtccacgcaaacagttccttatccgtttccacacggccaccgttcaagtaacaccaccatcccttctcagtctgtttggcatcaactgccagtacacaaacctgcgaaccgaagttcttcgcaatctcgtctatcaatccgggacggcggatagcagaggaattgatggagattttatcggcacctgcattcagtagcctatccacgtcacccagttcatgaatgcctccacctacagtaaaaggaatactgatattcgcagctatgcgtttcaccaattctgtgaaagtcttacgaccttcaaaactggctgtgatgtcgagaaaaaccagttcgtcggcaccctgctcactataagcacgcgccagttctaccgggtcacctgcctggcggaggttcacaaaattgacacctttcacggtctgcccatcttttatgtcgaggcaaggaatgattctttttgctaacacggcggtttgagttatgagttataagttataagtgattaatttttaattttcaattttcacctttcaaccaacaaagttttccagttctttgaaggtaatgcgaccttcgtacagagccttaccgaaaataacggcaggtataccggcagtttccagctggcggatatcatcagcacaacttactcctccactggctatcaaatagagttcagggcggtgctccaatatctccttatacagcgctatcgatggtccttgcagcattccatcacaactgatatcagtacagataaccttatgaacccccttctccacatagtctttcaagaacggaaacaattcgcaaccactctcatccttccaaccattgacggctattttatgctctttcacatcagcgccaagaataattttctcagagccatacatttgaagccatttgcagaacaattcgggattcttcacagcaatgctgccgccagtcaccatctgcgcaccgttctcaaaagctatcaccaaatcttcatcactctttaccccacctccaaaatctataataagagacgtacgcacagctatctgttccaacgtgcggtagtttaccacatgatgggaaaccgcaccgtccaaatcgaccacatgaagtctgcggataccatgagcctccagttccaaggccacttccacgggattttcattgtacaccttcttgctgtcataattgccttgggaaaggcgtacacattttccgtcaataatgtcaatagcgggaatcagttctatcatttcatttacgatttggcgatttacagttccaggaaattccgcaaaatacgctctcccacacttccactcttttccggatggaactgtgtggcgtagtaattgtctttatgcaaagcggcactgaacggatgaatataatccgtcacggctgccgtacaatcactgacaggcacatagaaactatgtacgaaatagacaaactcttctttagtaaagcctttaaaaaggccactatttatccgagcaatggtattccatcccatatgaggcactttatcctcgtgcctctgagaaatgaaacgtttcacatcagtatcaaaaatccccaggcaatccacatccccctcttcagaatgacggcacatcaactgcatgcccagacaaatgcccaataccggctggcgtaattcctttatcaacctatccataccactggcacgcaaaaagtccatagtggtttccgcctctcccacaccgggaaagataaccttatcggcagcacgtagcacagcctcatccgctgtaatcactgcctctactcccaggcgtttcaaagcataatccaccgaacggatattgcctgcattatatttgataactgcaaccttcatttttttattgagaattgacaattgaaaggtgataattgaaaggtaatgactggttccacaccatcaattatcaactaattaaatattactgttttattcctatatgccaacaccttgcgttcaatatgcttctgaacagcacgggaaagtacaatcttttccaagtccttgcccttgttcaccaaatcttgcacagtgtccttgtgtgtaatacgcaccacatcctgctctatgataggaccggcatccaactctgtggtaacatagtggctggtggctccaataatcttcactccacgttcaaacgcagcatgatagggcttcgctcctacaaatgccggaaggaaagaatgatggatattgattatcctattaggataagcatttatcatttgctcggaaatgacctgcatgtagcgtgccagcactatgaaagttatcttatgttctgccagtagctccatttccttcttctcttgttcctcctttgtctctttggtgatggggaaaagatggaaaggaataccgaaacgctctgccacatgctgcaaatcaggatgattgcttatgataagaggtatctctacgttccactcaccggcagtataacgcgccagcaagtcgaacaagcaatgggacatcttcgagacaaaaatagccatgcgcggttttgtatcggagaaatagagacggaaattcatctcatacttctgtgcatacaaggtggcaaaataatcttcaatcttttcttgaggtaccagaaaatccttcaattcccattctatacgcatgaaaaagatattctctacatggtctacatactgatctagatagataatattacctttgttcaccgttataaagtctgttacttctgccaatatgccaggtttgtcagggcagtgcagcaacagtttggctgttttcatcatcctaaaatgttttttatcatttttcaaattacaacattctcgttttgagttcgcaaaaataacgatttattgcaaaacaaagaacttttcgagcaagaagtttaaaacaagctccgaaatgtttcgttttctccaggagagattttcatatcaagaacaaaacagtgcataaacaaatttctaaacagttgttaaatttacttttctctcatttttacaatcttctcaatatgaggatataaagcaaatacagcacaaaacgcttgaaaaaaaattcgtcatagctattgcagatatcaaagaaatgcctacctttgcaaccgcaatcgagagagatagctacaaaaaaatgaaataatggtgcgttagttcagttggttagaatacatgcctgtcacgcatggggtcacgggttcgagtcccgtacgcaccgcgaataataaagtaaacctctgaaatttaataatttcagaggtttactttattattcttccgacaaaaatgggaagtcgaaatatccggtgcacaagcaactttcgggtttcagccttctcagatttacatcgcaagaataagaaactgagcagcaatgaatggatagatcgccccctggataagggtaagacctgaagaagatataggcagaatccataatatcccatactttttatcacggaggttttatgataaggatttgggaattatacatcaagcttctccacattacacatagaacatcaagggaaaaagtacccacatccggagagtaaaagccacacttccgacactgcatgcaacgggattgcccccttaaatgcagtatttgtacgaagaaagtgaagaataagccctaaatcggtgttaatagatattagggtaaaaaagcatcgttaagttcttactatcagaaattaaatctgtaaatgaaaagaaaaagtagtgctgtcaattacatctttatttaaaattggatgcgggctacaactgcatgtgtaaaataggatactctttaccttctccgtccaaatcggaccttttgtatacgttaaagcctatatatttataaaaaccgacagcttgaatattctgctcgttcacatcgactttcgttacctgcaaatgatttatggcataagtaaccagttttttcccaattcctatgcttcgataattattgtcaataaacaacatttcaagatttccttctgcaattcccataaatccgattaagattccctcctgttcaaatccgaatagagtgacatactgaaaatataccggaagctgttccttatagtatagaaaatcttcctctttaagaaaatcatgtgtactcaatactgcactttcccaaatttctatcaaacgtggataatccgtaactttaatttttctaatcataattgtaattgctatttaaagccgcaaagttcggaacttatacattcaatgcactgaacccaggttaaaaaatacgtttacggattctgcttagtgcttgcggcgtgatacccaaataagaagctatatctttgagtggtatatagtttaatgtaatgccatattcttcaatcatctgtagataatactgttcaggagaatatttaatcaggtcgatatttcttttcaagagtttattcagtagtatagcattcaaatcttcaaatacggttttcaccttaggaatagcagtatacagttcatctactcgcttcttgtctattcggtaaataacgctatctacaattgtctgcacattaaatgcagattttgtttgtaaggtaaaagatatgttcgacattgaaaacgtaccttctttacaaaaccaaaaaatctgctcttcccctttatgattcaaaagccaacaacgtaacatcccatcataaacgaaataactatatctttctatttctccttccttaatcaaaaatgtatctttactaatcaatatccgctcaaaatatcggtcaaataacttagattcctccaaattaaaagtattgatgctaaaattaaattctttaagcagtttttctaaaagcataatattcactgactatagtttttataagttttgacagccgatttttattccacaataccaaaatgaaccagagcgttccggataccatgctcatccaccgtctccgttatataatcggcaacgcttttcacagcctcggaagctcctcccatagctattcccatcccggctgcacgaatcatggaaatatcattcccgccatcaccaaaagcgatggttcctgaaacatcaaatccataataggaagcaaactcattgatacccatagccttgcttactcccgccacattgacatccgcaaagaaagggttccatctggaaacagaaagtccgggaagttgtgccataacttctttttccatttcttcatcacaatatatgcataactgacagcatccgcctcccataaattccttttcaatgtctgccaccggcggtgtagggtggttgaccagcctggccaattcgacgacggtcggattgagttcgttgacaaaaatacctttattcgtttcgatagccagagcaaacccataatgttgagccaataccagtaccctctgaaaatccttttcgggaatctgtttacgagatataggagtgccatctctcagtacacaatcggacccattcaaagctatcactgcatcgtatggaatctcttcaagttcgtgaagatcggtaaacgccctcccagttgctattatgatttttatatcggattcatgaacttgctgcaacgcttcgatagccgactgcggaacgcggtgagtgtcgaaactcaccaatgttccgtctacatctaaaaatatagctttggtctccattataaaatattttggtctaataaattatatatatttccctcatctcaattttatgaatatctatattcattcggtgtaactcccgttgctttcttaaacaccagactgaaatattgcacactcggatagcccagccgacgcgctacggcagcaggtgtattaccgccttccgacaacatcttcctggccgtatacaagcatttgagctggaaatgttcagccaatgtcttgccggtttcaaacctcagcaaatcatcaaagtaagccgtcgaaagattcagtctttcggcacagcacccggaagtgggcagcttcccctcctgcaactttccggaagtgatatattcgtccaatatcccttccattttccccagaatcatcctgttcttattctcacgggtgataaattgccgctcatagtaacgtgagcaataatccagcagcaattcgatgtgacgggacagaatggtattgctatgcgtatcaatggaatgatgaagttcatcctcgatattctcaaggcaacacgtcactttggccatttcgcgctgtgacagatgcaacgcctcctccttgcggtagaaaaagaaagtatagttgtcgatatgattctttaacgtggtacaaagcaataaatcgggatgaaatgccagcagccagcctttgtccggaagcgtattattcttgttcatccggaatatctcgccgggagtaagaaataccatcgtagcattggaataatcataatatttccgcccgcaacagtcgcatcccccttcacaattctctatcagcaggatagcatagaactcaaacttcacggcatcctgatacacattaggattttccagattaataatgcttacctggggatgcagcgttttgcatcccaaacaccggttacactcacatacagtctttatgtccaatgtattgtctttcatcacctataaagccattctcaattattgcaacttcagatatctaaaatcgttaaggatatgttttccaaacgttcacaatatcccaattacaaaattagaggaaaatccggatactttcactacccttattacggattatataaccttagttactgtctttatatctggttacgtgacttcatctccagatacttgtttatcacatcgacagaaagattctccggtgtagtcagtaaagaacagatgccgtgctgcttcaaggtggaaacagtcaaccgattctcaaatacaaatttctcggcaatgacatgacggtaataaccttccgtatcttttgcaggcgtggcgatgtactcttccaaatcggtatcttcaaagaagatgacaagcaaccggtgctgacggttcaactgctgtagataagccagttggcggttcaggctgcttataccggaaaagttggtgtacagcaccaaaaggctccgtttgttgacatgcttgttcaagtgtacgcacaatgaggaaaagtcggtctccccaaaagtagtctgctggctgtaaaggttctcaagcaatgtcttcatttgcccgggttgccgggaggcgtggacaaacgtatcaaaatgctcgttgaacgtcaccagtccggctttatcctccttccgcatggcaacgtatgaaaggacaagggaggcgttgattgcatagtcgagcaaagtcattccgcgaaatgcctgctgcataacccgtcccttgtctattacattatatatttgctgggaacgttcgtcctgatagacattgaccatgagttcgtgccgtcgggcactcgccttccagtttatcgtgcggtaatcatcccctttcacatactcctttatctgttcaaactccgtatgatgccccaccctgcggatgcgctttatacccaactcggtcaggttgtcactgatggccagcaactcataccgatgaagcatcagataggacggatataccttgacatcctgaggagcaccgcaagtatatctgcgggaaagcagtcccatcctgcctgccacaaacacccgaatccgtccgaaagagtaaatcccccgccgcgtgggacgcagatgataggtaatcgtcctgccctcactcgcccggagcttcatcctgaaatcaacattccgcaactgaaatacaaaaggaatctcatccactacttccacagctaccggatacggataactgctctccacacgtatgttcacggcgttctcatctccgttggagaaacgagtagcacactgacggaaagcccggatgccacgaacgcgatagagcataaccccatccaccagcaccgacaaggccaggacaaacagcgcccactgcccgattgtaaagaacggagcaaaagcatacccgatacccatcagcaggataatcagcacaagagtcatatagaagcggcggcccagtctcatttcggaacttccactttatcaatcagacgttgcgtcacttttaccggtgaataaccttccatctcggcttctgccgtcaatatcaggcggtgctgaagtacatacggagcaacgaactttatgtcctccggtgtcacgaaatcacgtccttgcaacagtgcatacgccttcgaagcctgcatcattgccacagatgcacgtggagaggctcctaaatacacagctttgctggtacgcgtctgttgcactatcagcgcgatgtattgaagcagtgtacgatccacaaacacctgctccatcagcctgcgcaatgacagcagttcttcctttgtaaggacaggcgtcagactatccagcttcaccagcgaagcattcgtgtggtgaagctccagaatatccacctcctcctccaacgaagggtatcccatggttatcttcatcaaaaaacggtccaattgcgcttcgggcaatttataagtaccctcctgctccaccggattctgggttgccagaatcgtatagagttctcccatctgatgcgtggtgccgtcaatgctgacctgccgttcttccataacctcaaacaaggcggcttgcgtcttggcaggagcacggtttatctcgtccaccagcacgatgtcggcaaataccggtccttgatggaagtcaaagtcattggttttcatgttgaagaccgtagtccccaacacgtcactcggcatcaagtccggagtaaactgaatgcggctgaaatccgccttaatcaaacgggcaaccagacgggcaagcagcgtctttgccacccccggcactccctccagcaacacatggccgtttgccaggacagccgtcagtaccaggtccactatctgctcctgccccactatgaccgtagcaatccggtccttcaacgcttgtatcttctcggaaaagagagtcaagtccacccgtttttctgtgttctcttccataaatatcttctttatatatgattgattatttcattcattttatcgacaagccgtttcatctcctcctcagagatgctgcgccctccgtacatcaccggcctcacctcgcggatgaatgcggcaatttcccccgcttccatacccgtcttccgggcaatcctgccgaaagagcgctcatcctctgccacttcctccacatccacttgcatttccctcctcagttcctccgcaaaatagagatatttcttgcggactaagtcagcatggtccttcttctgataataaagggtacctatcaactctgcaaactccaaagacttattctccggttcgcggataacgggaatggcacgctgcttcctacgggctgtaaatatcataaagagcaggatggaaaccatactcaagtacaatgcccagcgaagcggaggctgcgaaaggaaatagcgaaaaggagacatctgtgcctgggctgtttctttcatatagccttcggtacggacaatgggaaatccacccatttgggacaatatacgaaaaagataagccgcattcttcccatccagcacaccatagttcgtaaaaagcaggggagtggaagccagtataacctccccctttccccaagaaactgacatggcaactggatgagcagcttctccggtaacagttttttccgccaacactttacaagaaatggaatctgcaaagaaataagactggcaaagttggggatagaaacagaaagtctgctgcggataaaccgccgaatcccccacccagcacaaactgtctttcgagagcaatgcagtggcatattttttcaaagccgacggactgaaataagaatagctgcactcaaatcccagcgtatctttcaaaatacggctgaaagagctccccgccagcataatccggtctccccgtcccgccatcttcaacatcgcctccacatctacatccgtcagatgcaggttatcggtaacaaccagtattccgcggcgaagcgtcgtatcttcctgctccagctcataaaaagtctttctcgacaacgaatatcccttcggcaacgatgaagacaccaggctatcgaacacggcacagccgaacggttgcttgtcataatggctgaacgtagggttccagacaaacttcttcggcagacggcactctatcgcaaacatcaacaccagaaaagcaatgataccggctataaaccaatggttccccttcatgccatccctcctttctccacttctttctgcaaatcccgcatcgcatggaacaatgtttcggtcgcttcaaaatttccgtaacgtacccgtagaaaatggctggtcatttggcggaaagctggcagacggacttcatagatatattgtgtaggcgttttatataactgccagtctatacgttttccatcgctgagctgtttcagcgtctgcagatagagcaaacgcaccgcctcccgataatccgtccggacaagcgcatcggcaattccctccgcaaaatccactccatagatggtatcctcccccactgtatagggcagggtactcttgcgcgaatgcatgaacagttccggacgcttcttgtacaaaaaccagatgaccaatacaaggataagaatggcaatgcatatcaacacgacctccgaatattctgccaccaacgtattcccgaatatcttgtccagcagcttgccgaaccatctgctgaaccactcaagtacattaatttcgggagctatcagctcacggctgtaagcaaacgccgggtcggactgccaaacggcaatctgtgcagtatcacaaaccagtgtatcagccggaaccatattcatagtccgttatcagagtttatcaaaattgtcaatatcactctccaccatcacataatctatcttttccgaagcatgaccgtattgataagccagtcccagcaatgagaaaatcatggacatataaacgccgaatgcctggaccaccgccagcagataaagcacaaagctataggctgccgatacagtggcaccgccacctgcatcagtcattgcaaagatatatttcacaatggtcccgatataccatggaatcatcgtcactccctgcaagatggcggcgatgaatcccataacaatggaaatcagtacgatacctccccaggtagcgaaacccagtcggtaggccttcttcaaggcatctatgatatagatatcttcgaacagatagactggagcccaaatagccagtggcacagacaccaccacaacgagcagaacgaacaagaacgcaagcgctataaacggaatgatggtggctataaaaccaacaataagccctacaaacagcaccaaaagcacactgacaatcattatcagaaatacccttctgacattacggaacaacaagggcttcagcatccctaacgtcactccctccaagcgttcttcccgttcattgtaagtacggaccaatgcgtagaccaaagaggtcagcatgacagttcccagcagatatagaacggcatacagactgtaataagtcaccagcgccatgatggacgctccgacaacagaagagtcgaacgagcctccggtcatatcacccaaaaccattgtaccgctcatcagcccgttcaggctcagcccctgaagcaggcaaagcggcaacatcagatatgtagtgaatttcatcaacggcttccagttctctttgataaaatcaaaggtagcagttagtttctctccaaaagaacgttgtacatacagtgcgattttaggtttctgtgcttccatgcttctttctgttaggtaaataaatataataaaaaaagataaacgacaaagaaagtagaataaagccgaacctcaaagcatccgaaagttcagtatgacgggtaacaaatccttctataaatcctgccatgatgaatacgggtaccgtacccaccactattttcagtccttttttggctccccgtttgaaagattccagccttgaataggttccgggaaagagccatccgttgcccagggcaagaccggcggcaccggctacaataatcgcccagatttcgagtgtcccgtgcagccaaatggcaagggaggactcccaaagcaagtcgtgctgataaaagaaggtttggaaagcccctatcatgatgccattgttaaggagcatgtatccggtgccaaaactggtcagcagccccatggcaaagcagttgaaggagaccatgatattgttcagcgtgatactcagaaacatggggaactcggaggaaccgttatatacagccatggattcaccattagcgatattgttcaaagtcatatccacataagagtttcctaaaatcaaacgcacaaaatcggggtctccggcagcagataccactcctatcaatgcgctgaccacaaatataatgaaggaagccactaactcacggcgtgcatcgtgcatggccgaaggcacttcacgggtccagtaggtgataattcttgaccatttctcgcgcttgtttctataaatgcggttgtgcaatgccgaggcaagattgttcagatagatagtgatgcgggaagcggggaaatgcgtttgggcaaaagccaggtctgccgtaagctccgtatatgcgtcggcaagctcatcgggagacagactgtccgcctgctccactattttttctgcttgtttccatttttcgatgttccgccggataaacgtcacttctttcataccccatgaatatttcagagaagttttgtctgaaatcggtaacaaaaataagagaataatgatatatttgcaatgaaatactaaaaatgttttatcaggaatggcagaatctacaattatcaccgggcagtttgtccgcatcagtcaaacgcctgccagtatcggtgaacggctcattgcactggtcatagactatattctgctcggattctatgtattttctactttggccttgttttcacggattcatctgccctctgatttcacgatgcttttcttcctcgctatcgtctacctgccggtcttgttttacgcatttctctgcgaaatgttcaaccagggacaaagtctcggcaagcggctgatgaacatccgtgtcgtaaaagcagacggttccacgcccggtataggctcgtacctgctccgatggcttctctttcctatcgacggaccggtgaccggtggcctgggacttctggtcgtccttttgaccaaaaacagccagcgaatgggcgaccttgctgccggcaccatggtaatcaaggaaaagaattaccgcaagatacacgtcagcctcgatgagttcgactacctgaccaaagactaccggcctacctatccacaagcttccgacttgtcattggagcaaatcaacgtcattactcggaccctgcaatcgggtaagaaagaccgtacacgacacattgcctcccttgcgaaaaaagtgcaggtacttctctccatcactcctcatgacggtaacccggaaaactttcttcaaaccattctccgggactaccagtattatgccttggaagaaatttaatacaaacttccaacaaaacccaagaagtgttaagtcttacgcttatttaagattcaagctgcatctttttggtttttcatttgttaattaaccagaaggtcttaactaaataacaaagaacaattatgaaacgaatcattacattaatcacactggtgttggtaagtgcatcgaccctgatgtatgcacagagtagcagcgaaacacgccaagcagagcgtaaagcccaacgcgaagcccagaaagcacgcgaaaaagcggaaaatgaaaggaactatgccattgccgtccaggcattgaaagagggcaagtttgtattggaagcagaccagctggtgttcaagagaggacggagcgcatttgtttcatcgacaacaaacttcgttctgatggacggtgaacacgcatccgtacaaatagctgccaacaatgcccttgcaggccccaacggaataggcggcatcacagtggacggcagcagaaaggaaatgaaaatcacgaccgacaaaaagggaaacgtgaattgcagcttcagcgtacaaggcatcggaatatccgcacaagtgtatatcacactgaccaacggcggcaataatgcatcggcaagaatcagcccgaacttcaattcgaataccctgacgctgaacggagtcctggttccattgtcccagtcaaacgtttacaaagggcgggctttataaaataccccttttgtccgtacaaagtataaagaaaagaagatattcatatcgtgttcgcaggatacgaatatcgtgtagacacgatattaacagaatgcgatacaaggaattaataaactgttatacagaatattaattccttgcatcgtacataaagggagctaacagaatgtggacatttattcttttatctgttgacacgtcgggcaataatataccgaaccacccatataagcctcttttatgatggtactgccacaacggagacaaggattcttccatgttttggcagaaagaatggttttgtaacctccggcgttgccataaagatctgtttgcgtatcgcgtccgccctcggaagtcatatccaccaatgttttttttagagcattaaaaagaacttctttctgattatccgacagaagtagcactttctgtttgggatttatccgtgcattgaacagaatatcctgcgttacgccattaccgacaccgggaatatgctgattggttgccaatagagctttagcagagagggtcttctttgcttcggcaacgagtttctcaaattccgcttcggtgtatttatcgctcaacggcgaaatgctttcccgactcaatttatagtacttattgtcgatatagctatcaggataaacattgataaaaccatacattgcaaccgtgaagacaaggaatgaatcatcattaaacgtcagcaacaactggtaattggcaggaatctcatctcccgcactataataacggacactgactccgtcgcctatgttcatgatcacattatccgaaagattgaaattgacaaacatgccatatccttcggatgaaaggatggttttacctacgagcagtttaccatactccgacggttcaccgttatagaacgtaaacttatgcggtttggtggcattaaatacctgcgtgattgttttaccgctcaaggcgttgttcacttgtttgctcaaggtgataacttcgggtaattctaacatattatcttacttttattttcgatagggatatatatttccgttaataactcgtcaatagccgtgttgccaggtgtattataatcaatatcactcattattttaaccggaccacttcccctataataggcatcaacacgttcaatgagtctttctctttcagattcatggcattcttcagcggttcgtcccagcggtgtctagccaaagcatatttggaatgatgaacagtcagaatcttttccgcattcaagtccctggccgcttgccccaaatattggggcatggtatggatatatttccaatcttcgttatactgcccattctccaatatggcaaggtcaatgccaggatattgcttgcctatttcggcaaaatgcgtgtcatatccgctatcaccacccatataaatcttctgcgaaggggtttcgataaggaaagaagcccataatgcctgatttgccttcaacgagcggcccgaaaaatgccgggcgggcaagcaatgaagcagaaatcccttatccagtacagtatcttcaaaccaatctagctcaaccagggatgatttgtcaaatccccaatactcgaaatgttcgcctacccccaaaggacagaccaccttgcctacccggtttttcagctgcatcaccgtctcataatccagatggtcccaatggtcatgtgatatcaccagatagtcaatctccggcatatcggcaggcttgtaggcatccgcccctttgaacggcttgtttacaaacgaaaccagagaagccacacaaaatacggggtctaccagtatacactttccgtctacctggataaaataggatgaatgtccgaaccataccaatacattctcgtccttgcttatcttgctgaggtccgtctttataaccggaatctccgtttcaggacgcaaatcggtttctttcttaaataagaatccccagaaagctcccaaacgtcccttttgggaagtcatcatcaccgtactgtgcagattccggaattctccgtctttgtaatgaggcgacttctttatcctctccaaccgttctccttgaggagccctcccgaaactcggctgattgacaaaaacgaatcccgctatgaccgcaacagccaaatacccactataatgccaactatcatacgtactcttttcgtttttaatgaattcatattcaatgaagctacatttacagctgcaaatatagtcgaattgttattaaatcactatcttcgcgcccaatttacggaatcaatacaataaagaaataaaaagccaacaaagaaatgaacacacacagtctatgttgcatcggttatattacccaagataaagtcgtaacccctaaaaataccatatatatgccgggaggcacctccttctacttcgcacatgccatcaagcacttgaatgctaacgattttctattggtaacagctttggctgatactgacatgggcattgtggaagacattcggaaagaaggtatttccgtcaaagccttgcacagcacacattccgtctgtttcgagaatatttatggagaaaatcaaaacgaacgtacacaacgtgtcacggcaaaagcagaccctttcaccgtggaaggtttgaaagataccgatgcacggattatccacttgggcagtctgcttgccgacgacttctctttggaggtcatcaagttcttgtccggcaagggactcctctcggtagacgtgcaaggatttctccgcaaggtggagaatgaaaaggtgctggccgtagactggccggaaaagaaagaagcattgaagtatatccatatcctgaaagccaacgaagctgaaatggaagtgctgaccggatgcagtgaaccgcacgaagctgcattgctgattgcagactggggcgtgaaggaagtgctgctgaccctgggagataaaggttcgctgatttatgcccaaggagaattccacgaaatacccgcctaccctgccctgcagattacagatgcaacgggatgcggagacacctatatggtaggatatctgtatatgcgcgacaaaggcgcgtcttatcgagaagccggatgctttgccgccgccatgtgtaccataaagctacaatcgcacgggccgttctgcggaacggaggaagcgataaataatgtgataagaggataagatgatggggtgatagcaggatatcaccccatcatcttatttacaatccgaatttcttcaaatcatcttccacactaccaatacctgcaatatggaacatatcaaccagtaccttgacgacatttggagaaaggaaagcgggcaatgtaggtcctaagtgaatatccttcacaccgaggctcaataatgccaataatacaataactgctttctgttcgtaccacgctatgttgtagactatgggaagttcattaatgtcgttcagctggaatacttctttcagcttcatggctattaccgccagtgaatagctgtcattgcactgcccggcatccaatacacggggaatgccgttgatgtctcccaaaccaagtttattatagcggtatttggcacaacctgcggtcaggataacggtatcttgcggcaaggctttagcaaattccgtgtagtagtcacggctcttcatacgtccgtcacaacctgccattacgataaagcggcgtatggccccggtcttcacggcatctaccaccttgtctgccagttgcagcacctggttatgggcaaaaccgccgataatttctccatgctctatctccaccggaggctggcattgtttggcaatctctatgatttcagaaaagtctttcctaccttcagcatccttatcaatgtacttgcaacccggatagccggtagagttggtggtaaacatacgttctttatacacagcatttgccagaggaggaacgatgcaattggtggtaaacagaatcggtccgttgaaggaagtgaattcttcgcgctgtttccaccaggcattgccataattgcctacaaaatgggaatatttcttgaaagccgggtaatagtgagcaggtaacatttcaccatgtgtatagacatctattcctgtgccttcagtctgtttcaataattcttccatatccttcaagtcatggccgctaatcaaaattcccggacggttcttcacaccgatattcacctttgtaatttcaggattaccgtaagtaccagtattggctgcatccaatagagccattgtctttactccaaactcaccagcttcgagaaccagcttcacccactcctctgccgatagagactcaactgcaatggtagccagtgcgcgttgcatgaaaacatgaaccgtatcatcattgaatcccagacgcatggcatgctccagataggcagccatacctttcaagccatagacaagcaattctttcaacgagcggaggtcttcattctgttcacgcagaacacctactgtcttcgcttttccggcatagtcatcacgcgttccctgccaagtcagttcatctactttgggtaagagcactttgttatgcttggcctcttgaatcaatccattacgcatggtgattcctttatctacccgcttcaaaatgctttcatcatcgaaatttgcattcgtaatagtgcagaacagagcatccgtcacaaagatattcacttcttcggagaccggacaatctgccttgcgcaaaacatcggcaacgacagagacacctctaaccacaaacagcaacaagtccatagcttgagccgtatgactttcttttccacatacacctttcagtatacagccggttcctttggctgtctcctgacattgataacaaaacatgttcggttccatattcttattcatttaaaagtttacatcatctttccataagataagcggcacctcagcaataaaaataagcaagcttattttctattactttcggtttgcattatctttgtgcaaagatgagagttctacaacgcgaaaactgtcacgaatgttacatcgaatcacaaaaaaagtaaaaaagagaatggaaatccatacattattgaaaatgcctccttttcaaggcataacagaagaagaattattatccctcatcctggcacccgaacatgcacgcaggcaatacaaacctgctgactttattgccatgcagggagaagcataccgttctctattcatattgtgctgcggcagtgtgcgtacccaaatggtcagtgcagagggaaaacaactcaccatagaaacgctgaaagccccgcaactacttgccccggcttttgtctttgcctccgaaaaccgcttcccggtaaatatcgaagcaaaagagaaatgtgagatactcatcataaacaagaatgtcttcctggaattcctgcatcgacaccccactgtgatgcgcaactttctgcaactggtatcggacagaactctgtttctctccaaaaagctgaatgcctttgccctgcaaagcctaaaatcgcgcatactgaactatctacgcatgcatggcacgatactcaaccagcaggaagtggcacaaatactgggagtggctcgtccctcgctagcacgtgccttatcggagctggcaagcgaaggatgcatccggatagaagagaaggaaatgcggataaatgaaatctccgcccaaaagtatttataaaaaaacgcccacaaaacacgcacgcctgcgcatcttgcggacatcttcatccttttataaaactgcctgctttttctaagcaactttctttaattacatgctcgctttcctaccgcctttccgaaccaatctgcgaatccaaagataatagcccgtcagcggcaagctggcccctaccaaagcggcaagaaaactcaatatgcgggtggtcagccctccccaactgcctacatgaacggagaatatccagccacggatttttcctgaagcgtcggcatccttatataaggtagccccggtgatttcaccgctacggggattgaacgtatagcggtcggcagcacgctggttgcccaaccgattgaaagaaaccgtagcagagcctttggacacggtaatctgtttataatcaggattgagttccttcagttcttcgtaaaccttctgccagcttgtaaaaggagagaaagaatttctttcacgatgctcacctcccggtctgccaccagaccggccttgagcccgttctcctccctgggcagcagtttgtgccgaagcaccatgtcctccacccccttgcgtggtttccactccgaaaactttgtagaagccggtgcggtaccaggagaaagaccatgacagtcccgtaagcgccattaccagcagaaaaatcagcgtgtacatgccgcctgccacatgcaggtcgtaccagaagcggcgccaacctttattggtaacaatcttcagactgttcttcaaagccttttttgtacggggccaccagatgacaatgcccgatatcaggacaaagacaaacatcagcgtggcagtgcccacaatcatttttccccagaagatgcctccatcgggcttcatgctgtccagcaaccagcgatgcaggcggaacatggtcgtgaaaaacggcgcacgctcatacttgccctttatctcacccgtatactggtctacatagacggaagcacgacgaggtttggaaaggttcacctgccaggcacgctccggagcagacgaggctgtgacacccgtcacaaaaacactatccggcagagtagcggccactttttcggccaccttgcccatgggaagcggtgccggcccgactttctccacatagtagaggtcgcggcggcagagctccatcacctccgtctcgaataccagcatggctccggaaaaacagataagggtaatcagtagcccgaaggggactgaaagccataaatgtattttacaaaaaactttcttcataggagctttattccagtttacctacaccgttcagttgggttgcattgacaaccagacccttggtagctgttgcattggcagggtctaccttatagatggcaggatagccggaagaggtagtgactgccacatatgcgttgccattttccatgtacggggtattaccaaagccggagacatcgcttggaaggccgttcacataagtcaaagctccggtggaggcattgaagacggcaagttggttggcaaccttgtctgatgccgtaattgccttatcatacatcagcaacaggaaataattacctgaaatataccaagtgcgcaagaaagaggcgccattggctttctcttcaagattatagtaataggcggcatcaaattcctctgctttggtatcgatgcgtacaactccggcaggcaatgtagtctgctgacgcgaatcactcatggtcttggcatagctcggagaaaatacatatacatagccgtcgtcggcaagccagttcatctggtagtactgtgacttcatgcgtccggcagcataactgattttgtctgtagtgatgaccttatgagaattcagtgtctgatcaccaaagatagcgatatggcattcattaggatactgggtccattgcaattcgtccttctcataggcaccgctaccctgcccgccggattctgtctttattaaatcctcattaccggaaagcacccacttgtaactaccgtcttcattcttctgcatgcaaccatactggctaagccccatgggaatggctgctgcataaaccttactgcccacttgttctataccggccagtgttacgtattcaccattttcaaggaaattttcggcaagaaatggagtatcctttgttaccgagttctttgtataagtctgtttctcgacatccagataggaaatcaaaaaagattggggagtatatccatttgcatcattcagttccgtagggccgtcgccggtagaagtcgtcattataaattggtcataatagccgtaggtagtgaaacgattgacgttatactcctggctacgtttttccagttcaccgtttgtattcataatgaacgactgggtagtgcctgcatttccctggtgataattcaaggcatacagatatttgtttccgtagaacacccagtaagtagccccatcgttcacaaggccattgccggcagcagtaatttcaccgctttccagtgactcggctgtcagcaggacaggaacggagctacctgaaactgtagccgtggcagctatcacatagttaccctttgaaccggaaccggagccggaacccggttcgtctgtgtctgtacaagaaattaaagccattccggtcattgccattgccaagaggccggacaaaagataattcttcttcatttgttcttcttattaattacacctattaaaaccattatatttattaatcaccaaaatgtacacgtaccttgccatagaacgcacgcccggctttctgaagactgaaattgtcgtacaaatcctcgttcgtgaagttgcggcattcaaacgagatattatagcggccattcttcagactatagctcaatgtcaggttatgggagaactggtcgggtaccatgaaatccttgttcttgctaccgatggcctgcgaatagtaggagaagctgtgcatgtactggttgtcgtaagtcacggacagcatattccctttcttccagaggtcgcgccaatagaagtttacgtcaaaatcagcaaactgatagggcacattgggaatgcgtgccttgtaaccgagattttccacagagttgccggtactgccgatttgcatcttctcattgtcacgcacattcatctgcgtgaagttgccgcccacactcagccagcgtccgaagccatagcgtgccgatacattgtatcccttcgtcagcaccttgccgtagttggtataagtggccccttcttttcctccgctcaagtcctggatattgcgctggatataatccttcgtattgcggtataccacaccgccttccacgtagacggaatgttttccaaaactccgggaataactcaggttcaagttgatgttgtcacttttctcgggacggatgccgatgtctccactctccagatcttcgtcaccaaacatctcttcgatagtgggcagacggtaagctttttcataagagagcttcgcctgcaaaccgggcaggatgaagtaggttccggcagcaccatatccccaagagtctaccgtacggctggtgcgtacataattactaccggtatcatcctcggccataggtcctgccacatactggcggtagtatttgccgaatgccgagaagttccacttttcggaaggcatcaggcggtatgacaaaccggagatattcttgcgggtctgcttggcaatggcatccgtctgttcttccaccgccaacagtgaagtattatcacgctggaatgcactcaacacatgattgaaagtcagcatgtggaccctcgcaatgcggtaattcaaggtcaatgtaccgttccaattgtcattatcggcacgggaatactggcgggactgttcgccggggctgttcagcggatgtttctcaccaagccagttgtattcgtagcgggcagtatccacattcgtagtggcattgcgattgtagttggctgtcagcaccatatccagccccttgattatcaggttgcgtttgctgtattccatcgaaggcatcagtgaatggccaaagcggtgcttttccccgaagactgtcttctggcgtacaccggtctgtatgtccttgtacatgtgcgaataggtgaaaccgaacatcagccggtctgcccaacttttgtccacaatacccgctttggccacaatggcttcgttgtggtaagtatcattgaaacgcttcacgcgcaccttctcactttcgttgaaactgcccgtctcaaaatcctttaccggcgcatctacatgataatcgttgtccgagtagttttgaaaggcattgatttcatagctgaaaccgttcttgaaagtctgtccgaagttaacgtatgagcggtgggtattgaacgagccgtaagaataagaagcatccaggaaccagttccggcgtttcttgttggtaacaatattgatgacaccgccaatggcatccgtaccgaagcccacgggaactacacccttatatacctctatacggtcggcaaagctcaccggaatattgttcaggctgaaggagcttcccacaccttcctgcggcacaccgtcaatgaacaccttgacgtgctttccgctaaaaccgtccagcatcaactgcatatccgaacctaccccacccgactcacggagtttcatgcccggagccttggtcaaggcatcgctcagattcttcgtggtgttctggagttcctttgtatcgactgccacagcattgaatgccgacctcttcacccggcttactccggtagaaacgatagtcacctcgtccagctgttgcgtttcgggagcgatggttatgttcagcttcatccgctcatcattgaccagtttcacctttttctccacctttgtataacctacggcagacaccaccagcgtatagtcgccggcaggcgccttgatgtgatagaggccttcctgattcgtggttcctccataactcgtccctttcagataaacagtcgcaaaatccaccgtttctttttccgtagaaatgattctaccagaaatcatccctcctctcctctgcgcatgtacagacagagaagccaacagaaggagaaacagcagcgagaatttaaatgtatatgctttcaattttataataattataatgttgttagtaaaccggtgcaaaggtcattattaacatccagctgtgcaatcgcttattgtaggtaattatatggagtggatttatcgtatatatcataccatgcaatcaccattgataggtattatcaataataaaacagataaaaaaaatgaaaacgagctcggaaggtgctgaggaaatctcttaaataataaaatcaaaacagtttcttattcgtcagcggcatttatgcggataatcgtaaaagagaaaataaagatgtagcaaaactaatgatagagaagccttatattagccgatgaataaagacagactaacttctcatttactaaaaactattcgtccgacaaccgttacattatcgtccgacggctgtttaattatcgtccgacagctgttggacgataatgcaacaactgtcggacgaataaaaattagcaaacaagaaactaaaggtcagtagacaaggatatagaatatagtgatgcaaaaattacctgtcctaacagccccccttctatttataggagccatcagatacagcatcttattcacggttcatcaaacgatgctccgccatctgctcgaacttcgtgccgggacgtccgtaattggcatacgggtagatagagatgccgccacgcggggtaaagatacccgtcacctcgatatacttaggattcatcaaatgaatgaggtctttcattatgatgttcacgcaatcttcgtggaaagctccgtgattgcggaaactgaacagatagagcttcaggctcttgctctccaccatcttgacatcggggatatagcaaatacggatttccgcaaagtccggttgtcccgtgatgggacaaagactggtgaattcggggcagttgaaacgcacccagtagtcattgccgggatgcttgttatcaaatgcctctaatacttcgggagcatagtcctgacggtatgctgtctttctccccaaaagggaaagttggtctttcaattctgtcatagccatatatttttagtgatacaagtgtgcctcatttagtagaagccaaaaacttttccaatccttctctgcgcaacgtgcatgccgggcagtgtccacaaccatctcccgggataccgttataacaagtcagcgtttcgtggcgtataagttcgagcactccaagctcgtctgccagcgcccaggtctccgctttgtcaatccacatcagtggtgtgtgcagtacgaattgctcgtccatagccaggttcagcgtcacgttaagcgacttgatgaaagcatcccggcaatcgggataaccgctgaaatcggtctgcgacacccccgtcacaatatgattaattccccgctcgcgggcgtagacggcggctatactcaggaaaaacagattgcgtcccggcacaaaagtattcggaaagctgtctgccggcttctcctggtccatctccatgccggcatctgtcaatgagttatgtcccagccggccgataaaggaaacatccattacttcgaactccacacctgccttacgggcaatggccctcgccaagtccacttccttctgatgcttctgtccatacagaaaactcagcgcatacactttcttaaattcacgttttgcccaaaagaggcaagtggtcgagtcctgcccgccactgaataccaccaaagcagtgttcctattcatcttgttaaaagcctctctgtttccctcccccgtagggagggaaacagagagggcattgcttattatttgtttgacataataactgatttcccctcactacgggtaaggggctttaaatatcgcctattttccatactttataggagatgccttcatcatagacatcactaccgtctatccgcttaatagcttttaccacacggatagtcacaggcagtatcaatacctcgtacatggacttcagcagaatctggatacacatcatcaccagcaactcccgccatgcaatgattcctccgaacgccaccggaaagaaaatcaacgagtctgccgtctcaccaaccaccgtcgaccaaatggcacgtgcggagaaattacgcccgttgcttgccagtttcatgcggctcattacgtaggcattcagaaaagagcccaccaagaatgccgtcagactagctatgacaatacggggagccattccaaagacaaaattgaaatgcgcggcaccatcccagaaaggggcggcaggcaatgccacggctatcagtcccagcattaccacaaaaaagttcatggcaaaaccgctccagattatcagacgagctttacgaaagccccaaacctcggcaatgcaatcgttgataatataagaaacaggaaagaccagcaatccggctgttacggtaatacccaaaaactggataactttagtctcaagaagattggctgcaatcaagcatacattgaacagaatgcccagcaacataaaaggtacagatactttttgtttcatactcctgttttttacgtggtgttctagaatacacgaccgttattcacggcatcatacattttaaatccggttgcaaagatacaacaagttttgcaaatgaacaaacaacatatattttaactaaaactcaagcaaaacgaaagtcctttttttattcgaagtaattgcaaactgtgcatatttagttaacgagacttaaatagaacatcccaaacaaagaatattatttacaacaactttaaaatataaaaactaaaagcatataaatcaacatattaataaattatagtacaaattcaaaagcatgcaaccgaattcatcctcaaacaagatttcattcacgcaaattccttaagcatataaaataatagacaacatattttaatacttaagattctatattttaaataattaaaattagggttatatttgataacaacaatccggaagctctggaaaacacattgatattaaccaagaatataccatattatatatagtaaccttagaaaaacaatgaatgcctatgatttacccgaaagccccaaaacactattagtgtcatcttctattcaacctatttattttgagatccattagcttaaacaaaaaacatctattatgaatgaaaatcgtaaacgaggaacatcgaacaacaaaatcctcacagtaattgccatcgcctccctatttataggaagcagcaaaatcatggcaatagagacctattcggaaaattcattcggagtgacagaacagatgcaggcacaaacagcccgcggtatcattgtcgaccagaatggagagcctatcatcggagcaagtatcttggaaaaaggtactaccaatggagttaccaccgacttatacggtaaattctcgctaaacgtaaaaagaggtgccaccctggtcatttcctacatcggttataagacgcaggaagccaaagcagatgccaacatgaaaatcacccttacagaagattccgaactactggatgaagtagttgttgtcggttacggtgtacagaaaaagaaacttgtcaccggcgccactgtacaagtgaaaggagaagacatagccaagctgaacactgtggatgccctgggcgctttgcagagccagtcaccgggtgtcaacatcacgcaaaacaacggcttcctgggttcgggctttaaggtgaatatccgcggtatcggtactaccggaaccttctccccgctttatgtggtagatggagttgccaacggtagcatcgacgggctgaacccgagtgacattgaatctttggacgtcttgaaggatgccgcttccgccgccatctatggtgcgcgtgctgccaacggcgttatcctgattaccaccaaacgaggtaaaaccggcgttgccgaagtcagttacgatggctatgtcggtgtgcagaacctctacaaaatccctactatcctcaatgcccaagagtacatgatgatgcaggatgaaggccgtgtaatggacggattgagtccgtacaactgggcgacctatattccggaaagggatttgcaggccatacagaacggaacatggaaagggacaaactggctgaaggaagtgctgaatgaagatgcattggtacagaaccacgcagtcaacatcaccggaggaacagaccgttccagatatgccataggtatttcatacaccaaccaagaagctaccatgggagttcccggcgaatttccagaaatgaaccgctacaacttccgcgtcaactcggaccacgtagtcatgaaaaaaggcaatcttgacttcctgaaagtgggcgaaaccatcaactacaaatattcgcaaacgcaaggttcattcggaaccggcggcatttattggaacggagtgcacaatatgctcatcatgagcccgttgatgcacccttacaattcagacgggggctactacctctatgcagaccaggaaaaggataactacaaatgggatatctccaacggagccaataaaaacccgatagcttatctggactactatatgaaccagaacctaagcaagtcccattacatgcagagcagcttctatgcagaactgcaacccatcaagaacctgcgtatcaagagccagttcggttacatcatgggagcctccagttatcgttcctatttgccgagattcgattatctgagtgcgtcactcaacaacgcagaagacaaggttacccaatccatgtctatgtataaccgttggtcatgggacaatacagccaactacatcttcaatatcgatgaccacaacatcgacgtcctggtaggtcagagtattgaaaaatggggtatgggagaagaaatgagcggttcagccataggctcaaacttctatgacttcaagcacgcttatttgtccaatgttccattgaccgccaacagtgtgtcctccttgactggcaagcctaacggggaaggttccatcgcttccttcttcggacgcgtcaactacaactatcaggagaaatacatggcttctgtcatcatgcgtgcggacggttcctccacttttgcccgcggacaccgctggggatacttcccttcagtatccgcaggatgggttatcagcaacgagtccttcatgtcaggaatcaaatggctggacttcttaaagctacgcgcttcctgggggcaaaacggtaactgtaatgtatctactttccaatatctttcactgataacttccaacaacggatatggcggttatacgttcggcgactccatggacctcatcagtaccggttcatacgcctaccgactgaccaacccggaccttacctgggaaacacaggagcaattgaatttcggtatcgatgcacgcttcttgaacaaccgcctgggctttgaattcgactggtataacaaaaataccagagactggctggttacggctccggtactctcttccttcggtgccaatgcagtatccgtcaatggcggtaatgtaaaaaacacgggtattgaagtaggactccactggaacgacaacatcggaaaggatttccaatatggagccaacctgacccttgctcacaacaagaatgaagtgaccaagattgccaacaaagacggaatcatccacggtagcggcagcgttctgtgggaaggagccgaagagtgcttccgtgctgaagtaggcaaacccatcggctacttctacggctacaagagtaacggcatattccagaaccaggaacagatagacaactacaaaggtccgaaactaaatggcgacaagacacagccgggtgacgtaatctgggcagacaccgacaatagcggtacgctcgatgccaatgaccgtactatgataggtaacccgaatcccgacctgacaatgggactttccctgaatgccagctggaaggccattgacttctcaatcactacttacggcgcattcggccagcagattctgaagtgttatcgtgacttctcctcctcacccttgaataactatacagcagagatattccaacgctggcacggcgaaggtacgtccgacaagttcccgagactgtccagcgcttccagctccaactggaacagagtatcagacatttatatcgaagatggagactatctcaagataaagaacatcactgtgggattcgacttcaagaaagcattcaaaaagttaccggtacaacagctgcgcctgtatctgaccgcacagaacctctttaccttcaccggctattccggtatggacccggaaatcggttacggtggcgacgattatggttgggcatcaggcatcgacctgggctactaccccagtgcacgtacctatatgataggcttaaatgtaaaattctaattaaccgaagaaattatgaaaaagatattattcatagcatcagcaatactgattcttctttcaggatgcgaaagcttcctcgattcggaacttctgaccgaaaagacaaccgccaacttcccggagacagaaaaggacgcccaagagatggtgacggccatatatgcccatctgttgtttgaaagtcctgaaacctcttcccagtattacattgctcagttggcaagtgacgactgcttgggaggcaacctctcctattccaacaactgtgccaccaacttccttatgtacagtggcaatctgaatacatttgccggtatttgggaccgttgttacaccctcatcaaccgtgccaacaatgccatcaacacaatggacaacgtgaaatcatggtccagcgagagcgaacgcaaccgacttttcggtgaatcctatttcctgcgtgccatggcatactatgagctggcacaagttttcggcggagttcccttacgcaccacactggaaagtaccaacctgccgcgtgcatccgtagacgaaatctacgcccagattgcagcagacttgaaaaacgctatcgaaatgatgcccgcaaagatttatccgaaaggctcagacatgaccggacacgctacaaaatatgccgccgaagccatgatggcacgtgtattccttttctataccggacgctacgaaaaaaccgagcttcccaacggaactaccaaagaggaggtcatctcttggatagatgactgtgttaacaactccggtcataaactggtgtccgaccaacgcaacatttgggcctataccaacgatgctaccgaagacaataccgaagggttccgttaccaatacgtcatcaaccataacctgaaatgggaaggaaacagttccgacgaaactttgttcgccaacaagcataacctgaaatccgactggacctatacttggttctccaacacttgcgcccaattctattcaccgtctgccgacaactattccaacaaagacagctaccccttcggcaccggttggggagctggcccagtatctccggccatggtcaacgaatggaaagactgggccgccaagcagacctatacagacggttacaaggaggatccccgtctgaccggttccatatggtcgtacaaagcacttgatccgaatgttgccggcaatgtgctgatggactgcaccatggacgagggtgaaccggaatataccgtatcctatcgttactatgaacaaaccggctatttccagaaaaaatacatcaatatcaactcctacaatgaaggcaaaatcgaacctttcggcaagcagatgttccccggaatatcttcgcagacatcccaacagctactccaaattgccgacttgattcatatccgttttgccgacgttctgctcatgcagtccgagctgaaacaagacgctacgggtctgaacaaggtacgtgcccgctcccacttggctccggtggcctactccctggaagccatcaagcaggaacgccgctgggaacttgcattcgagtccatccgctggtgggatatccttcgctggtcgggtccttcgcttgaggaagccggtgacatactcaacaaacagaccgggttcaatataataaatgccgctacggtggtaccgatggtaaaattcgactataagaaacgcctacaagcaacccaaggctactggcccattccgcaagacgaaatcgacatctccaatggagtccttgagcagaatccaggctgggatgcatctgcccagttctcggattggaacaatatgtaagagtattaacctataaataaagacaatatgaaagtaacaaaaatattgatagcaatgcttgcttcagccttcatcgttactgcatgcgatcctatcgaagacgaagacttgcgagacaaatatgtgactgatgccggtacacccataaccaaggaggcattacaagccgccatatccattacccaacccttccccaaccaagacggagtagtggaaggtgaccagtatatagccctgaaaaactcccgcccggacattggcggttcatggcacatagaatgggggggcgaaggaagtaaacaaagtaagacactggtcacagacaatgctacggtcatcatggaatccaatgcagactattccatctactatatgggtatttccgccaatcagattatcaagacagagccggttgtagtgactgtgaccaatgtattcgacgattggtccacttacttcaccggtgcaaccgacaagagtgacaaatctgccaagaagacctggaaattccgtgaagtcagctggggttccgtctgcaatatgggggctcatggaggctggaaatataccagtgcaggctatactcccgaatcaaattttgcctggtgggccaatgtcactgccgccgaagccggagaccagtccatggtattcgaattcgacggaaacaagatgaaaacctatgatgccagcggaaacctaaaggcagaaggtactttctccttcacacacgaaaaaccggaagacggagtactgggtgaacttataacgagcatccccaccatcggaggaaattatgacgacaacggacaaagcgtaggcagcaacaaattctggctgctgacactggatgagaactatatcacaatctatcatcccggcaagtatagcggtggtgtggattgggacgacagcggctggtatgcttacttcaagactgaagcaggaaccgattctgaataatatgcactctctatgaaaaagaaactgctatttataatagctactgtctttctagtagccgcatgtcacaatgacgactacatgcccggactgccagctccgggaaatgaagacaacgagaccgaaatggctgaacaggttgcaggccgggttgcattgggctacgtcacttattatggcacatccatacccgatgccaaatacctgacccacataaactacgcttttgcagaattatatgttaaaaacggaatttatgaaaagtttggcctgcaaggcgataaatcccgttttgataaggtaaagaaaataaagagccagtatccacatgtgaagatattactctcttttaccaatagcgtttccaattctgacaattcccaggacggaggcttctccgccctggcgaagagtccggaaatgcgcaagcaattcgcacaagactgcaaagcctttgtttcgagtgagggcatagacggtattgacattgactgggaatttcccggtatgaccttcggcagcaatgcctatgacgagttggtagatgtggagaacttcaccctattgatgaaagacttgcgtgcagagttggggcagtccaccctattgacctatgcaggttattgcatggacaagcgtccccaaggcgaaggctataaatatattgatgtaaaggctgtagacccgtatgtagatttcgtcaatatcatggcctatgatctggttggtgccccccagcatcaatcagcattgaacaagcctagtaattactgggactgccagcgttccgtagacgaatacctgaatgcaggtgtatctgccgacaaattagtgttgggaattccgttctacggaagagccgatttcaatgccggcggcagcatcaattatcgggatattctcaacctgagtaaggatgacggctatgttatcgaaaattgggatgcagaaggcaatgtcccctatgtcaccaaaaacggcagtttctactgtggttacgacaatccccgcagtattgccgccaaaggtgaatggatattaaaaaacggcatgaaaggcatgatgttctgggattatgaaggtgacgacaccatgggaaccctacgcaaagcgctatggaatgccgtcatgaaaaaataagtaacttaacacacatcctcaggaggttattccggaaattagggtaagggtaattttgcatacgatcttcattcaaggcaagaatactgacggaataacctcctttcttcctccaagactacaaaaccttttttcatttaagttgttgaaagcacattcatcaaaacctaacttaaatgaaaacaatcttaaaagcaatgtttctgttgtgcgtaaccggacttcccttgtccactatccatgcacaaaaaaaagagattatcgatgacgaagctccaaacggcattgtcatagttaccatcgacaaagcgggcgacgagattatccgcatcatgaatgagtcacaattgccttacatccatgacccgaaagctccccgcttcttattgatggacaaacaaggcaaattcgccctgggtatcggagggtatgtccgtgccaccggcgagtatgattttggaggtatcgtggatgacatcgactttgttcctgccaacattccaagcagtagtaaaatcaaaaatcaatttcagatggatgccagtacggctactatctttctgaaattggtcggacacacccggctattgggtgacttcacagtctatactgctggaaatttccgtggtggagacaagacattccaactgcgcaatgcctatctttcattccgcaatataacaataggatacaattatggcggtttcatggacttaggcgccctcccttccaccattgactttcaaggtcccaacggtgccacattctaccgcgccacacaattgtcatatacttataaagggctgaaagactttcgtttccaagcttccatcgaggcgcctgccgttgacggcacaacaagcagccaattcgagattgcccagcaacgcatgccggacttcacggcttcggcacaatacagctggaacagcagcagtcatctgcgtgtaggaggtatcatccgcagcatgacatataccagcacggaaagggacaaggcttccagcgtcaccggatacggtgtacaagcctcaacgaccttcaacctcggtaaaaaatggcaggcattcgggcaagtcaactatggaaaaggtatcgggcaatacctgaacgatatcagtaatctgaacgtcgatattgtccccaatcccgaaaaggaaggcaaaatgcaggcattgcccatgctgggctggtatgcaggtctgcaatataacatatctccgaagatattcctctcaagtacttacagcatgtcccgcctttattctgaagacggttatcccaacgacctgccaagtacctaccgctacgggcaatatttcgtagccaacgtattctggaacgtaaccccgaacatgcaggtaggcgctgaatatctgcgtggctggcgcaccaacttcgacaattccaccaaccatgccaaccgtatgaacctgcttgtacagtattctttctaatccaatataaaataagaaagaagccgcctcaaatcgatatttgagacggcttcttaatatataaaggtaggattgtgaaatcagaacttatagtcaacaccaagaccaaacactttattagtacggctataaacattcttggtggtttcacttatcttctttgtataatcatcatagtttgtccaaaaataggctatattcatagtcaaatgctttgtcattttgatggcagcaccaaaccccagtgaataagaatcacatgaaaaacttatatcactctgaaaatcatcagccaagccataatctgtacgctgataaccaccactgatggtcagctgtttagctatatcccattctgcaccaatcaaaatttcatgtgtgccatgcttcaacgctttctgcttatcattggccatccctgccgctttatcaaaaaaatggtgatattccagcgttgcacgaagcgtaggaaggaattcataaccaacagctgcagtcaataatgcagggatatcactcggagtattcacaccatccttatagtcagccaaaggattcccttcatctcccatagcagttcccatcgcacgtacttcagcttttttggttttattttcgagattaagacttgtcataaactcgtacttcaacccaatattccatttgcccaacttcacatcagctcccaagataggggtcaatccccagccggtctggtcgcagtctaaatcgataccaaccaattccatgccaccataagtaggaatattactgtgtgcggttgcagtcagaaatccttcatacccaccggtaaaataattcatacgtccaccggcaaacacacctaaccaatcattaacttgatacgacaaccccaattgcacaccataaataaactggcttccatccattgcactattgatagaatacatattgggagtgatttgaccacccgaaatagtatggacttgtcccatcaccattgaatcgaacatacccaaaccatcatcaaacgatgccttaccaccaccacctacaacagcaaagctaccggaaatagtccagtctccttttttatatgcaccttgaaaactaggaatgaaaggagcagaagcttttcctttataataacgtgtattcccatcttcaataaacaagggaaatgtcgcctttatgttacgggtctgataagcactttgtccattcaaagacaaatagagaccatcttccggcagaaaggccaaaccggccggattagaatagacaccgtcaatatcaatggaagcaccacgcgctaacattctaagaaaagatacatgctgatttgtatttgttaggataccacccgcaaaagttggaattgaaacgattaacatcgcaatgccaatcaacgaaaattttctcatctaaatcttttttaattgttttcgggcgcaaaggtacaataatattgcacataaaaaatagttttgtgcataaagttatcctaatataatactttcattgaaataccaaatagtttctgatgaaacaaatggaaataattatcattttatgaatccttccggccactgaaccatatcaactttccacttgttatctctctattattatgtaacatttaaaaaacaacaaatcccatggcatacactattgcattttttggcagcaaaccttatgatgaagcgtctttcaatgaaaagaacaaggaatatagttttgagctccgctactataaagggcatctcaacaagcacaacgttattttaacccaaggcgtagatgcagtctgtatcttcgtgaacgacacggccgatgccgaagttatccgtctgatggcggacaatggtgtgaaattattggcgttgcgctgcgccggctacaacaatgtagatttgaaagcggctgccgactgtggcattaacgtagtgcgcgtccccgcctattccccttatgccgtggcagagtataccgttgccctaatgttatccctcaaccgtaaaatcccacgcgccacctggcggacacgggacggaaacttctcgctgcacggacttctgggcttcgacatgtacggaaagacagcaggcatcatcggtacgggaaaaattgccaaaaaactgatatgtatcctgcgcggattcggcatgaatatccttgcctacgacctctatcccgactataattttgcccgtgaacatcaagtggtatataccagcctggatgagctttatcacaattcgaatatcatctccctgcactgcccgctgactgagcagaccaaatatctcatcaacgactattccatcagtaaaatgaaggacggagtaatgattatcaataccggacgtggacaactcatccataccaacgccctgattgaaggactgaaaaacaagaaaatcggctctgccggcctggatgtgtacgaagaggaaagcgaatatttctatgaagaccaatcggacaaaatcattgatgacgataccctggcgcggctactgtccttcaataatgtcatcgtcacttcgcaccaggcctttttcacacgcgaggcactggcaaacattgcttcgacaacgttacagaacatcaaagattttatgaaccataagccactggaaaatgaggtcaaagcatagttcccactcatttacaaattattagacatcggttttaaaactttataactttccaaagcgttactagtatataaaccattttaggaaaaggaataaattatgaaaaaagttatagacaaatcagatagcagaggtcattccctatatgattggcttgacagctaccacaccttcagttttgacgagtattacaatccccgccggatgaatttcggcgccttgcgtgtactgaacgacgaccgtgtggctccgggaaagggcttcggcacacatcctcataaaaatatggaaatcatctccattcccttgaaagggaaactgaaacatggggacagtcatcagaacagccgcgtcatcactccgggagatatacaaaccatgagtgccggcaccggcatctaccacagcgaaatgaacggcagtgacactgaagcggtagaattcctgcaaatctgggtgatgcccgaaaagctgaacacaccacccgcataccaggacttcgacgtacgtccacttctgcgcaaaaatgaaatggcgctaatagtatcccctgacggcgatgctcctgccagattgctacaacagacctggttctctatcggtgaaatagaagctggaaagaagattgactaccacatgcaccaatcgcattccggtgtctacatcttcataatggagggtgaagtcaaagtggacggcacagtgctctcacgtcgtgacggaatgggagtgtacgaaaccggcagttttgagctggaaacactgaaagactctcacattctcttcatagaagtaccgatgtagcgtacttttgcataaaataacagcttaaaccggaagtttgtgtagcgttttttgtaatattgcgctatgaagttacgaaaagagtgtaatttattggaaatgagcgtaggttaattgctcttgatagtaataggttacgatttagttagttatctactgcattatccttctgcgcgttgcgtaaccttcaaagaactcttcgtatgcaaaagtagctatttaattcgagattttgatataaactcccgttttttatcccctcattcataagaattttccgtaaaagcggtattgtccgtcggcacaccattgcccaaaacgagtttggaacaaacgtgtgccgactaccgcatagctggagaaaagggcattgcctcacgcctaaacgatgtttagacagatgaagcaatgcccctttcttttgcgcctatgccaagaggtgcttttacgggttttcaaatgatttttcttttttcgctgtctcttttgccggaagcggaaagtgaatgcagagtgtgtcagcctgccccatgaatgaaacaggcgcccacacacagccggacaaaccgggaagaatgattgttgccacccggctgaacaagttccgtcggatcggaaacaatcatacttcctttgttgtggtttgcccttttcacgcttccggtgatgtctttttccttttggtgattcttttttttacggattttcccctgaagtttttttctacacaatctgcctctgttttcgtttacctccattttgcgcctttcagtaagccgcatcagtcagtcattttcgttctgggcgcaaaggtaattccgggattggacgggaaagcaaggtcaagcctcctgttttcggtaaaaatctccagccctgcgggtagtattttgaccgaaaaaccttgcattccctaatccctaccttttcaagcacccgaaacgaaaacgaccgatgcgacagaaagacgcataaaaaaaatgtcggataaacgagaggcagataagatagtttgaaactcaactccctcagctcttgaatccgcattaaaaacaaaaaaatcaaaaacagcgaagatatgacggcaacggcaaatttcagacaaatggcgcaacacatcgggttggcgatatgcggcttgatgatgcgcaccgccttcggggtgttcggcatcctttggggcatcatcagagagattgtaaacggagtgttccgagtggcgataggtgtaatcgtggctatcctttccaccattgccttctttggcttcatcctttggttattcaccctttaacccttaccgacatggcaaaaagaaacagcaagacggcagcgcagcagtgcagatattacgaggtggacaacatcttcgtgtatatggtggaaacgtacatcaacggcaattttgaaactttccgaagattgtaccacgaactgaacaaggacgcacggagggatttcatggacttccttctcagcgaggtagagccgacctattggagagagatactgaaacagataatctaaaaatgacagcgatatgaaaggaacagaccatttcaagagaacgatatatatgtacttggaacagcgtgcggaggaagatgcgctatttgcaaagaagtaccgcaaccctgccaagaacatggacgagtgcgtgacccacattctgaactatgtgcagaaaagcggttgcaacggtttcacggacggagagatattcgggcaagccatccactactatgaggaaaacgagatagaggtgggcaaaccgatggactgccaagtggttgtgaaccacgttgtgaaactcacggcagaggaaaaggcggaggcacgtcagaacgctgtccgcaaataccaagaggaggaactccgcaagttgcagaaccgccacagaccgtcagcgagaaaagaaaaccaaccccaaccctcattatttgatttaggcttatgaaaccgaagaccaagatacagaaagaggtggcaagactttccgccaaccttcgccccatatcagcgacacaaatagattgggcataccgccactgcgttgagcatatcggctaccgcaccaagaaagggaacatcacctgttccgactgcggtcacgagtggcacagcgacagcggactatgcgacacccttgaaggctgcacctgccccaaatgccatgccgaactcaaagtgcaggacacacgcagacgcatctacaaggaaacgcagaatttcagcgtgataaccacctgcaaagggtatcaggtaatccgcgtggcgcaggtcagatgcgagagcaggaaaggcgaaccgatgcgtttctactgccacgaggtcgtgcagcgttggatttcacccgacggcaaggttacggacatggcgttgctccgtggcttccttttctgctattgcgatgtgtgggcattaggcagcgatatggaggtaagaccgcacaacagcctatacgatgatgtggtggcaagaagctgtgcatatccaaagatgaggatattgccccaactcagacgtaacggcttcaagggcgatttccacggcatctcccccgtgcgtcttttcaaagccttgctttcagacccaagaattgaaacccttatgaaaggcggtgagattgaggtcatgaaacactttcttttcaatacccgtactgccgatgaatgttgggcatcatatctgattgccaagcgtcacaagtatcagatagacaacctctcaatgtggtgcgactatctgcgtatgctcaaaaaactcggtcaagacctccgtaacccgaagaacatctgtcccgaagatttcatggcggcacacgacaacgcaacccgaaaaattgaagccatacacgagaaggaaagagccgcagagcaacgccgttgggagattgaaaggcgtgagcgtgagcaacagcgacaactccaacgaaagaaagatgcggaggatttcatcgccaacaaatccaaattcttcggcttggtaatcacggacgaggaaataatcgtcaaggtgcttgaaagcatagacgagtattacaacgagggcaagacgcagggcatctgcgtgtttggcagtggatactacaagaaagccgacaccctcatactatcggcaaggattggcgatgagattattgaaaccgtagaggtggacttgcgaaccctcgaagtggtgcagtgccacggcaagcacaaccaggacaccgaatatcacgagcgcatcatagaccttgtgaacaagaacgccaaccttatccgtgagcggatgaaagcggcatagcataacccctaaaacaacattgatatggaagtaagaattgaaagtatgatttgtgtgtgggatgatgcaatccccacgatgttccttgaatttgtgaacctcctcactctcacaacgagtgagggggaattgagaaagagcgtaaaggagtttgccgagaagcacgaacttgacaagtttttcctttacggcttcggctcacaccatttctacctgcaccaacgctacacaagcaaccccgaaatggtgatgaagaacagagttctgtcagtacatttttaaccatctaaaaagcaacattatgacaacacgaatgaccatcaacggagtaagcacctgcgcggaagcaggtacggagaaatacgagcgtttccaatcgggtatcggaagacgcaggcggacacttgtgcagtacgactaccgccaccccatagacagagaattgttctcttgtgtcaaacccacgttggacgagtgccgagccgcacgggacaagtggctgaacgcaaagaagggaaaggaggacagactatgaacacgacctatcaaacgctgatagtcaagttcagcgaacctatcacggcattggacggtatctttgacgataccggagcgtggggaacggacaccctcaaggggtggatagatgattacgaaagcacacgtttcaccgccaccgacagccatacggcagtcatcacgagcgagtacaatatggaatgtgtgaaagagtggctacaacggcagacccccatttccgaaatgcgagaattttgaacgggatggcggtgtccgcaccgccaatacttaaaaccctaaaaacaaaagatatgatagccaagacgatattacagcagataggcggaaaacgcttcaccgccatgacaggtagccgtgatttcatagatatgggcaacggcttacggatgagccttgcaaggaacaaaacaagtgccaaccgccttgacatcatctatgacgaaggggcagacctctacaatatgcgcttctaccgcaggacgttcagcaaaaagacctttgagtgcaagacaaaggacattgccgtacacgagggtatctattttgatatgctggaggaaatgttcacgatggtgacgggactttacacacgcttttgagtggcggggcggcgagagccgccctactttctttcagtgagcatgatggcggacaaagaaagtagcaaagaaacctttgtccaatctgcgataactaaaaaatccgcaagtaaaacttgcggaggctatatattgggtcgttattttttggtggaggggaatgataatctcgaaccgttgaactacacatttctgcttcgtctccatttcccccaacgatttgatacgttcaatcatttttgttgttcctttctgaattttcctaaatactttcttcataatttcgctatactttttatggttaataactatgttttgtattgctctcacaacacttacaacttgaagtgttatttggaaaccgataggcaaaaatggctcaacgatgtcaattaacgagaaaatcctacgataatctatcaagtgatagagcaaaagacgtgccaagttaaatatggcacgtcttttgccagttttgtcagtccttttatgggatatacaacagcgcaaactccgcctttctccgtttgagcagcatggcgtggcgttttcctttgtagttgcagaaggctatatactcacggtagatgttcctgtcaccagcttccagcttcttgattaaggtgcttttggggattgttttgctgcctaacagcttcgccggtcccacattgtaagctaacgtgccaagcaaaatcgaatcaaccccgaatttacggaacatggcgacaaatttgcgcaggtctttccgcaaaagttcatccgcatcccgttttgtcatggttcgtgccgaatacttctcgtttggcaaaagtttgtgaccccaaccgacgtatgggtagtgtttttctgagtgccagccttcaaagtagcggcagcataaaaaagcacgttccataagcggcagtcggtagattgccgcctgcccgtccgttccctcttggcggctgatctgcgcggacacagaacagaccgtcagaagtgaacagagcattgtcatgaatacacgcatcatttcaacaaggggctgaagttgccgatgggaacgatggtaagatcgtcgtcctttacattcctgttgttgaagtcaaattccagttcgtaggagttgctaaagttatcctccaccaccacgatgaaattatgcgcctcatcacccgccgccgtgtagtacaggcggaatttttcgttctccagcaggtagcggtcgttaggcaggaaggtgatgccgttatccattttgagcgagccttccccctcgaactggaaatagcggatggtatagagcgtacccgaaaagtcgccctcctttttcagttcacagcggatttccactgtctgcccctttactaccttgttcggcacgggcatgacctccaccgtgaagggataggactgctggatgtccatgtcatcgtcacatgacacgagggtgaatgacatggcggctatcaggcataacgccactgccttgaatattgatgttctcttgtttctgttgttcagtatgttcattgttcttcgatttttagatggttgtttttctgttttttcgttgtcagttgcaggtactcgttcaagtccttgcaaccgtcatagagggaggaacggtcggtgacacgttccccgtatcgcatggtaagtgcggcaagcgtccgccgtccggcttcgtcacggtcgaggaagcagccgatgcgcccgtatccgtccagcaatcccgccgccttctccacgttggcgactgagttcagcacaagacagtcagcgttaccggttacaccaagcgtcacggcagagagaaagtccatgaagccctcgaacacgaggcactcgtcagccgggatgtcattcgcctttaccagtgatacagacttcggaggtatgcaacccttgaaatatcggcttctgacttcatagccacctgccatgttcggaaagccaacggcaaaataccgtttcccacgcacaccgtagttcaagcggcagcagtgacgggatgcgatggcgtaagggatgccccgttcctctaaatactccgtcagcagtgagcggagcagcggagcgacctccacatcctcaaaaacggattcggtcggcttcgagagatagacgggcttttcccatccggcaaccgtcatattggcggcttccgctatgaacttcgcttgcttcatgaagtcatcgctttgcagaaactccccggcaagcgtgaagatgtcgccgcccttgcccaaaccgaagtcgtaccagagctgtttcgccacgttcacacggaaagaggatgtgcgctcgcccctgtacggggcaagataccacagctcgttaccgctccttctgacaggctcatgccccagccgtgcgagaaaatccgcaagcggcatccttctgacagcatctatttccgtcctttccatgcccgtgtcagttgatgatgaacttgataccgaccccgaactgcgtgtggaacttccgtgtgtcgccaccccaaaggcaacgctcccgcaggttggcaagcagggcgatacggtctgccacgtaacactccacatcgagcgtcagcgcaccgccgtagatgaaggcgtcccggtcgtgcagcgtggagccgtcatgcagcaccttcttcccccaatttaccgcctcatatccggcgagagccgaagccccggcatagacgaaaacaatctttcgggcgtccgacagtatcttgaagtaatagccgccctccgccgtgaactgcgccacgggtatcttggtgtccttgtagggattgttcttcaacaggtattcgccaccgaacacccacttgttccccttcttcgtgtaggtggagagagccgccccgaagctgtacccgccgtccttgccgccgagattgaagccgtccgccatgtccgccctcacctcgatgccctgcatcttcggcagacaccgctgggcgtgcgcctgccctgtaaaaagggcaagcgacgcgatgattattgcgatgtactttctcatggtcagcgtacttgaagttcgttgatggtacccgcgcgtaccaaatcctcgttctcaatcacgaaggactggtgacggccgccgttcttctcgttcaattccaccacgaggcacttgtcatcggggatggtgaacttcgccatcgtgaagaccgtgcgctcgctctttttgcccggcacgagggtggcgtagttctgcgcgcggagcggcagaataatctgctcctgcacggcagtacgcttcgcaaccttcttgtccacgattttccaagtgatgtagtccacatcgaaaggcacgttgctctggttctttatctccgtgtggaaataaagcaagccgttgtgcgtgtagatgcctttcaacaggtattggatgccgaaacgcttgcagccgatatgcttcacctcgcgcttgttctgtttgtggatggacttcatgataaggcgcaccagcatcgggctttcgctgcccagctctttcagatagatttcctgcgcgttgttcgggcggttcaccgtgctgccgtcatggatgaagtcgcacatctccacgttgagcaacagcggttcggcggcgtacttcacgttgaaggtgtagaaactgccgtcctccgtgatgacggacatattcgtttcgttgggaaaattccttacggtagccttcacacggatgatgttctccgctccgtcggctttcccggcaatcaggtcgggcgagcctaaatcgacatagcgcacctccgccggaaaaatgacgtggacggtcttgtcgtaggtcacttccagaccgtgcggcggtatcatgcggtcgaaggtcagcttgcgtgacagcccgtgatataggtcgccgtccgcctccttctgcggatagacctccttcgtcaaggtcggttgttcacttccgttggtcgtttcaacggttacattctcctgcgcgttggcagttatgatgcccatagcgagggcaaacatgatgattacttttctcattacttttggattttagtggtaatttttattgttttcaatatttttcttggtaaagcatgaccctgtacccggctttcagatgcaccttgacggttcgcatctttttggcgatgtactggctcgtgccttgtatcagccccttgcccaagtcggaggcgagctgcgccccggcattggtggagatgttgatgctgcttcccagcgagccgcccatgttggcggcgacctcccggacggcgttcatctccatcgagttcgggatgaagatgccgggctgtccgtccgtgtcatagaccgcaagctccacggggataatcgtgccgtcgtattccagcgaggtaatctcgatgtcgagccgctcaccctgtatcttgcccgtgccgaccaccaccgcaccccggggtattgtcctgcctgccaccgccataggctccagcaggcgcagccttaccgtctgcccgtccgtcacgctctgcgccccatgcacgcacgccggtatggtgttcctgtccaatacctccgccgtgccgacagccgtgttgaaaccccggttgcgttcctgcgataaggcggcgacaaactccgcgttactcataggctgtgagagtgaagaaactacttgatgctccacctgtctgataggcattgccttgttcttcttccctttctgcacggtagttggctctgccctctgttccgccgatggctgtcctccgttctgaccgcccatgtactttgccgccagctcgtaggacttctccataagagccacctgctcgtccatagaggaagccttgcccctctcgctttccagttccgactccagcgatgcgatgcgctccaacaattcgtccatctccgcattgtcgtttttcggctggtcgtagaagtttccgagcgtggcgttcaggtcacggtaggcggctgcggaggactggatggtctgcggcgtggctggctttgccctttcttccttgccgcccggattggcgaggtcgaagtccactccgttctccgttcccgctatctcgcggtcgaacatgtcgcccagctgcccgatggcacggttgcggctctcctgacgctcttccatctccccatgctcgtaggctttcagcttgtcgccgataatctgccggttcgccttgtcagcgtcgggcatctcggtgttgtatccgtccgttcccggcggttgctccttgccggaggacggggcgaatatcagccacatcgccccgatgaacaccaacaccatagcgggcagcacgatcatcttctgccgtttcagccgttgcgcctctgtcagcggttcgcgctcctttttcggtttccccgtttcgggagcagctttgttctctttcgtcggttcattctttgtctgttccatataaataaggtgttaagtgattgcctgtttccgccggggtcggcagttccacccgtccggcgtgtcccgtttccatatgtgagccgtcgttcctgccgatgtcatagacggctctgccgaaggtgtaaagggcaagcaccgcgaaggcggcgaacatccccagcacgatgcggcggcgtgtttccggcggcaagccgtccagataccctttgagacttgccgccaagcgtttccgtttgtcgtggagtttccaatacatgccccacattgattttctgatacttttcatgtcctgttaccgtttgatagtctgtaaatccttgttctcaatgatggtgaaaccctcgatggtaaaaccgttcgggttgtcatccgaccgcgatgcgttcagcaggcggcaggtggtcacgaggctgcgctcggtgacgttgctctgccggatgattttctgtgtggcgtaggtcacggcacggtagggataggcgttgaagtcgcacaccacgctgtccaccttcagcacttggttgatgttcccggcgatgatgcggttgtagtaccccttctccgcgaagtccgaataatagtggtacacgctcttgtccgccagcagcaaggcacgtttcacgttgtgttcaatcgcgcttttttcaggtgatagcgtgaagaacatctcgtggaaacggcgcacatgttcccgtgcctccgccgggcggttctgcgacaaatcctgagacaaggcgagcatcaggctcttgccgttgtccagcacatagattttctcccgttgcttctctgcgaaacggtaggagttccacacgctccacaccgtcaccacggcgcacagcgagaggaagacgataccgaacaggcgtatctgcctgaacgacgattcgatgtttctaagtgatttgaattccatttatattttccaatttatgattgcacattgattatttcagcaatttgccgacacgtccgactgcgtttcctgcggctgcacccgccacgctgcccgccatgcttccggctcgtcccgccatctggttcacgttgcgaccgtaaccgcccatgcctccggcttggataatccagcccgcaacggtgggaatggtaaagtagccgatgatgccgatgcagaggaatacgatatacaccccgtcgctcgaatccagcgagaagttcgggtctgcctgcatccgctcgatgtcgttttgcagcatcagaacctgtatcttcgccagtatggtgctgaacatgtccgataccggtagccacagatagacctgtatatagcggcatatccactgcgtgagcgtgttttggaaaccgtcccataccgacagggcgaaggctatcggaccgagaatcgccagcaccacgagaaagaaggtgcggacggtgtctatcacgagggcggcggcttggaacagcagttcgagtatctcgcggaagaagtcgcggatgctcttcttcatgttgtacattccccggtcgatatacattcccgccatcgtcaccatgtcggagggcgaccagccgagttcctccagttgcttgtcaaattcctcgttggacacgaggtaggcggtttcggggttgcgtaccatcgcctcgtattccagtttgtccttctgctcccggtatcggttcatgtccagcgtttccgcctccagcatctttgccgtgccctgtacgacgggtgagaggatgctgtttatcgtgcccagcaccacagtcgggaagaacatgatgcacagaccgatggcaaaaggacggagcatcgggaatacgtctatcggttcagctctcgccagcgactgccatacccggtaggcgacgtagaacagcgcacccagcccggcgatgcctttcgccacaccagccatgtccccacacagcggcatcatctgctcataaagtgaacgtaaaatctgatgaaggttgtcgaacttcataggctaccagtatctttcgttcatgttcccgtacagccccatgatgcggtcgaggtcgttcttctttttcgcacgcaggtaactcacggagatgttcttgttcgtgtagtagctcacgaggttgcggtaacgcttcatcttcgagtggcagcgttccaccacgtccatgcgctccttgtcggtcatggagagcgtggtgatgttcaccacgttcctgagttccgtcaacacttcgttgctttcctccagcagtttcgtgtagccgaaagcgattgcggaaagctcttcgggtctgaaattcccgtcacggagcatccgttggaaactgttcacatagatgtctgtgatgtcgcccaccatcaggatggtctgctgcaccttgcgggcgtccttgaccagattgttcaccgatttgagggcatcgtaatacttcttgccctgctgatagattttcaccgtctcctgaaagttgctcaccatgttcgtggcggtcttggaggtatggatgatgtttttggaggcattgatgatgccctgcgctagattgcccggatcgcttacgacccactgtgcgcttgccctgcccgcgaaaagcaggcacaggcagataatcattgttattcttgttctcatgttactttggattttagtggttgttattcttcggtcggatgtcccggctgcggcttcacccgcacatagtccccgtttggcgagaaagtcagcacatccgtggcctcgttgtaggacacgtcgatgcggaagccggtgttcatgaacaggttgccgttctcctcctgcaagagataggtttccggcttgagcttgcggcgcagaccgctacgacggaacaccgtcactttgtaggcttcgccctccttgtagataagcacgtcaggttttccctccacgctctcccagttcccgcacagcatgtcgcggcggttgtcggccacgtcgcaggattgcagcatcatgaccgccaatccgataaggcacttgctgacttgcagcattttcacttttggtaaattcatacgcgtttttcttttttggttgatacattctgttttttagttattccttgtttctccgcctttcggcaagctgccggatggcggcttcgatgtcgtcgcccagcttctccgccagacggtaaacctccactttttccgtttcctcggtggtgtacgccagatactcttccgcgctgacctccgtggcatagaccgccgactgcgtgccgcccaagcctatccacacctccttgtagagccgtgaagggttgttcgccatgttgatggagagtatctgcgacttctccttttccgtcagtccgagcaacgcctgtatctggtcgaacttgttcatatatttcctttggtcaagcaggattttacaatccgagttgttgataatgctctctttgaccaccggagaactgataatgtcgtccacctcctgcgtcaccacgattgcctcgccgtaatattttctgaccgtcttatacatatagcgcagatattcagccatgttcgccgatgagagggccttccaagcctcttccacgataagctgtttccgcacgcctttcagccgccgcatcttgttgatgaaggcttccatgatgatgatggtcacgacggggaacagttcgcggttttctttaatcgaatctatctcgaagacgatgaaccgcttgccgagcaggtcgatgttctccgtggagttgagcaggaaatcgtaacgcccgccccggtaatactgccgcatggtggtgagcatgttgtcgatgttgaagtcggacttctccaccttgatgtcacgctgtgccagttccttgcggtagtcgtcacgcatatactcgtagaaggtgttgaacgacggcacgatgctacggtcggattggatgcgctcaatataggcactcacggcactgcccagctcgccgctctccgtctttgtcaccttgtcgtcctccgacttccagagcgtcagcaacagggtcttgatgctgtccttcttctccacgtcgaagatgtaatcgtcggtgtagaacgggttgaagctgatgggcttatcttccgtgtaggtgaaatacacaccgtccgctccgcctgtcttgcgtcggatcatgccgcacaagccctgataggagtttcccgtgtccaccaataccacatgtgcgccttgctcataatattggcgcacgaggtggttcatgaagaaagacttgccgctgcccgaaggacccagcacgaacttgttgcggttggtcgtgatacctcgcttcatgggcaggtcggagatgtcaaggtgcagcggttttcccgtgagcctgtccaccatcttgatgccgaagggcgagagcgagctgcggtagttggtttcctctgtgaacaggcacaccgcctgttcgatgaaggtgtggaaactctcttccgccgggaagtccgccgcattgccgggtatcgccgcccagtagagtgtcgggcagtcgatggtgttgtggcgcggcacgcattccatgcttgccaactggctgcccacgtcgttcttgatatgcttcagttcctccgcatcgtcgctccacgccatgacgttgaagtgtgcccgtaccgaggtcagtccgtaggaatgggcttcgttcaggtattggtctatccactcgcggttgatgctgttgctccttgaatagcgagatagcgactgcatgttacgggcggacttctcgaacttctgcaaggtttcctcactgttgtctatcagcacatactggttgtagatatggttgcaggagagcagaagccccaccggggaggcgaatgacagtcggcagtcactccggtcggtggagagcttctcgtaacgggtgtcggtagccaccttgcccggcaggtcttccgcgtcggagagggtgtgcagacacaggcggttgtcgccgatgcgcatctcccttgccgaaagctcgatgtcctgcaaggtggtgtcaccttccggcatgagcgagaagtagcgttcaataagtcccgtctttccctcagtacccacaatctcatcggtggagaggcggcgcagcctgacaagcccgctgtcgttcatgatgcgctcgaactgttcgcaggcttccaagaacttggtcgtggtttccctgtccagctccttcgggatgatatgtccccggcacagcgtgctgaaattgctctgcatccggttacgctcctttgttgtcttggtcaggtagaggtagcaggtgtgtttcaggtacggacgctcgttgaagtgacgctcgaaagagcggcttaaaaagctcatgtcgtccttctgaagctccggtttgtagcgttccttgatgaaccagtcctgtttgtggacgacggagtagtccggcagcaccttgatagccttgcaccagcaactgtgtatcgcctcgtactccgcacccgtcacggtgtaaagttccggtagttccacctcgaaagccaccgtgatgtcggcgtcctttgagatgatgcagccatgctccaccgctaaaagtgggaacctgttttccagtgttgtcattttcgatgtattcctcattgtctttcttcctttcgttgtcgtttgaacagacgggttatccgccgccggttgataaggtatcggggatggctccgtgccgctcctaatttcatcagcccgtgttcaccgtaccgggcgttcagcgcgaaggtctgccatacaaggagggaggacgatgccgcgccgaagccgatacatatccactggtcgataccgaccatgtagaggatgacgaacaggacgaagagagccagcagacctccgcagaagatgaagaggtactgtgccttcaagcccttgaactctaccggacggccgatacccttgttgattgggtattcagccatacattatttattaaaggaagaatgagcgcaggatggtggcggcaacaatcaggaagatgcacgcgccgaaccacgaggcggctgtcttgctggtgtcggggtcgcccgatgaaaacttgccgtacacttttacgcccccgataagcccgacgactgcaccgatggcgtatatcagtttagttccggggtcgaaataagaactcaccatagaggtggcttcgttgatgcccgcgatgccgtttccctgcgcgaaagcggaggcggttgcggcgatgacaagtgccgcggagaggattgcttttctgtttttcaagatgttcttgttcataaactgttcttgttttttgccgtcaaaagggtggatggtcctttgtcgggcggttgatactttgtttctttactttggttttagtggatgcccgtttgtttccacggacgtgggcgtgtccgttgcggatggggatgcgccttgcgtttcctcgccgcgtgggttgatgtcattctttcatgttcatttcttttattgttgtcatacatagttgcgaatgtcgaactcctcgatgttgtccggcacgacgaactccttttcagatttcttcagccgaatctcgataagccccttgatgcggatgcctatctccgaagagccttccatcattttctcgtacaactccgtgccctccatgtcggtgaacaccttagccgccttttcacgttccgcctgtgtcgcgtccgggtttttggcggtcttgcaggcgtcgtcaatctcgtcaaagctgctgcccgaagcccgtggcgtgtccgaggcgtcctcttccggttcgtcgtccccgtatcccagttcctccggcggtatgctcgtgaaggtctcatcgagtttttcctccgggacttgtgccgggcgggatgcgtttcccgtttttccgtcgtcaaaagtagcctcttcctccgacagctcaatgcctttttcaatagtggcggcttcttgcgtcggtatggcagcggttgtccgggtggatgccatcctgaaacggctcttgccgatgatgtccgccttttccgcagggacttcctcgtgtgccgctatgcgtttagcctcattcccgtccagtgaccgccataatccgacaatgcccttgaagaagcggacaatccgcgtgtccatgatgcgctcgtaaaggagcaggaacaggaaccagaggttgcagccgaccgataccgccagcagaatgtctgtcatgctgattgtgtaattcatatccttccgtttttggttagaatactgaattgtaatttcgggcataaaggctctttatcgcatcttcgcactggttgaagtggtgcgtcagcacatggtcgatgtaagcggacagcgtaagccggtcatgcccgattacacgggtgatacgcatgatacgctcgtggtactccgggcgcacatacgccatcttcccctcacgtgcctttacttccgggtcgcggatgaacaggcgttcatagtccttctcactgcatttgccgcttaccgggacaggcgacagtatttccacactcgcctgcacttgggtaaacatacctccgcagtcttgctgtggtcttttttcattcggtgtcatttctttttccattttcaaatcagatcttcacgttgtttcttgtacagttcgttgattctctccttgtgctgttccagatgctggcgcagcacggtatccacatatccgcctactgagatttcccctccggcgatgtcgttcacgattctgaggatcttgccgtggacgtcacggctgatatagacacattggcgggtctttatctcgttgcggcgcaggaatagctcgttgtagtcctcgtcctgccttttccggcgtccactttccctctgcgctttttcccgtgttacgggttgcacaggagatggttccggtgcggcggtgtcctcttcggtcggtgcagctgcgggtacttcctgtgcggggcgcagtgtcccgtcctgtgtgcgccgcccgatggaggctaacagcagttcctcgtcgatgccttccgtgttcactttcctgctgcccatgctcactgcggtctgatgatgtcgcttatctcttcggaaaactcccggatgccactccctttcagcagtgccgtgtccatcgggaagatggtggagcggaaaacgctcttgcgctcttccgaaaggtcacggcggaacttcttgctgtcgggcaagcgggtggaaagtaccggaaagcccatttcggctatcacttcctcgtagatgccgtacaagtcgttcctctccctgccgtccaccatcgtccagaacagatgcagcccctttgttttcgcctgtccggtagtcatcagcctgtcgcggaacatcgtgacgaatttcagggtactctccacgacaaagcggtcggcactcagcggagtgaaaatgtagtccatctgcgagagcgtctttatcacgccgttgcttcggagtgtgccgggcatgtcgaagaacaccacgtcgggtttcacgtcctcagtggcaatcatcctctcggcatcgtcgagggcgttcaccgcattgcttttgacgatggtgtaggcgttctttttgatccggcggaaatggtcgcaagcgagagccttgaagtaggtgctgctgtcgataagccccatttcgtgttcgcgcagcccgtggatgctgtgctgcgggtcgtcgcagtccacgacggcgacattgtagcctttcacgttgtgcaggtagctggcggcaagtgccgtgacagtggatttgccgatgccacctttctgtgttgcgaatgcaacgaagatttccttactcatagttccatttattttaattgttgatgatttgtttttctgtttccatacggatttggctgtcgcaccatccgcttccgtgactacacacgcaggcgggtcgtcgcgtatccggttctgtggtgaagcggtgcgtcggacaaatggtgattgacgacattgcgtcatgaagtcattgaatccatacgtcaccgaattgtcggagaaccgggtttccgacggttcgggtatccgtttcggcaagtatccgaagaagcggatttccgggtatttgaatgttccgtttatcatatcttcaaatcgttcgtttcttgaatcatgctgcaaataaacaagtatattttggaacctgtatcacttctccggcaagtggcggcacgttgcgccggttggcagtcattgaccgggtcaagcatctgtccgataccgctttaagggcgtaactttgcacccggacagcagggttcgccgatgacgcgcggcccggagtcctgaaaggtattttcccaatccgtcccctgacggatttttatgttcacctgaacatagcaagatgtcttttcagccgctcaaaatattttgagcagccacgaaaagcacttgcccttgcagggggcgggctttccctccgaagtcgggaagcctttcagaactgcggtgctgtaatccgaagcggcggcttatgccgtcaatccgctaaatccaaagtaatatgaaagagaaaaggaaaagcaaatcagggagaaatcccaaacttgatccggcggtgtaccggtacaccgtccgtttcaacgaggaggaacacaaccgtttcctcgccatgttcggaaaatcgggtgtctatgcacggtctgttttcctcaaagcgcacttcttcgggcaaccgttcaaggtgctgaaggtggacaagacgttggtggactattacaccaaactgtcggattttcatgcacaattccgtgccgtgggtacgaattacaaccaagtcgtgaaggaactgaggctgcatttttcagagaaaaaggcgatggcgttgctctacaaattagagcaacacaccgtcgaactcgtgaaactgagccgccggattgtggaactttcaagggaaatggaggcaaaatggtcgcaaaaatcagtgtaggaagttcgttgtacggcgcgattgcctacaacggggagaagattaacgaggcgcaggggcggcttctcaccaccaaccgcatctacaatgacggttcgggaacggtggacataggcaaggcgatggagggttttctcaccttcctgccaccgcagatgaagatcgagaagccggtggtgcatatctctctcaacccgcacccggaggatgtgctgaccgatattgagttgcagaatatcgcccgcgagtatctggaaaaactcggtttcggaaaccagccttatcttgtattcaagcacgaggacatcgaccgccaccacctgcacatcgtgacggtcaacgtggacgagaacgggaaaaggctcaaccgggattttctctaccgccgcagcgaccgtatccgcagggaactggaacagaagtacggattgcatccggcagaacgtaaaaatcagagattggataatccgttgcgcaaggtggccgcatcggcaggtgatgtgaagaagcaggtaggcaacaccgtgaaggctctgaatgggcagtaccgtttccagacgatgggcgaataccgtgcgctcctttccttatataatatgacggtggaggaagcgaggggcaacgtgcgcggacgggagtatcacgggctggtctattccgtcacggacgacaagggtaacaaggtgggcaacccgttcaaatcctcgcttttcgggaagtccgcaggctatgaagccgtacagaagaagtttgtccgttccaaatcggaaatcaaggataggaaactggcagacatgacgaaacgcaccgtcctttccgtgctgcaaggcacttatgacaaggacaaatttgtatcccaactcaaagagaagggcatcgacaccgtactgcgctacacagaggaagggcgcatctatggggctaccttcatcgaccaccgcacgggatgcgtgctgaacggttcgcgcatgggtaaggagctttcggcgaatgccttgcaggaacacttcaccctgccatacgccggacaaccgccgataccgctatccatccctgtggatgctgcggacaaggcacacgggcagaccgcctacgacagtgaagatatatcgggcggtatgggcttgctcactcccgaaggtccggcggtagatgccgaggaagaggctttcatccgggcgatgaagcgcaaaaagaagaaaaaacgcaagggcttgggtatgtaatcagagtatcaacaattaaaaaatcaatgtatgtcacaacaagaagacgatttgagggcattggcgaaaatcatggattttctgcgtgccgtgagtatcattttagtggtcatgaacgtgtactggttctgctacgaagccatccggctgtggggcgtgaacatcggcgtggtggacaaaatccttctgaacttcgaccgcacggcggggctgttccattccattctctacacgaagctgttttccgtccttttgcttgccttgtcctgtctgggtacgaagggtgtcaagggtgagaaaatcacttgggggagaatctggacagcatttgccgtcgggttcgtgctgtttttcctgaactggtggttgctgcccctgccgctgccgcttgaagcggtgacgggactgtatgtccttaccattggaacgggctatgtctgcctgttgatgggtggtctgtggatgagccgcctgttgaaacacaatttgatggaggatgttttcaacaacgagaacgagagtttcatgcaggaaacgaggcttatcgaaagcgagtattcggtcaatctgccgacacgtttctattacaggaaacgctggaacaacggttggatcaatgtagttaatcccttccgtgcgtccatcgtgttgggtacgccgggcagcggcaagtcctatgccgtggtaaacaattttatcaagcaacagattgaaaagggctttagtcaatacatctacgatttcaagtatcccgacctatctactattgcctacaaccatttgctgaaccacccggacggctacaaggtaaagccgaagttctatgtgatcaacttcgacgacccgcgacgctctcatcggtgcaatcccattcacccggattttatggaagatattacggatgcctatgagagtgcctacacaataatgctcaacctcaataaaacgtgggtgcaaaagcagggcgacttcttcgtggagtcacctatcattctgtttgccagtattatctggtatctcaaaatctatcagaacgggaagttttgcacgtttccccatgctatcgagtttctgaaccgccgttacgaggatatatttccgatactgacctcttatccggagctggagaactacctttcgccgttcatggatgcgtggcttggaggggctgcggagcagctcatgggtcagatagcgtcggcaaaaatcccgctttcgaggatgatttcaccgcagctctactgggtgatgtcagacagcgagtttacgctggacatcaacaatcccgaagagccgaaaatcctctgcgtgggtaacaatcccgaccgtcagaatatctacggtgcggcactcggtctgtataattcccgtatcgtgaagctcatcaacaagaaggggatgctgaagtcatcggtcatcatcgacgagttgcccacaatatacttcaaagggttggacaatcttatagctaccgcccgaagcaacaaggttgccgtgtgtctgggctttcaggatttcagccagttagtgcgtgactacggggacaaagaggcgaaagtggtgatgaacactgtcggcaatattttctccggtcaggtggtgggggaaacagccaagacgctctccgagcggttcggtaaggtgttgcagaaacggcagtccatctccatcaaccggcaggatgtttccacctccatcaacacgcagatggacgcgctcattccaccgagtaagatttccgggcttacgcagggaatgtttgtcggttctgtatccgacaacttcaacgagcgtatcgagcagaagatttttcattgcgagattgtggtggatgccgaaaaggtgaaacgggaagaaagtgcctacaagaaaattcccgtcattacaaacttcacggacgaggacggcaacgaccgcatgaaggaaacggtgcaggcgaactaccggcgcatcaaggaagaggtgaagcagattgtgcaggaggaactggagcgtatcaaaaacgatccggtgctgtgtaaactgctaccagataatgagactgtctaacaagtccccaaaattgaaaattatccctatcgaagtttgaagtgacccccaaaagttggatacaatttttttggggggcacttcagttctgacgggtaaaatcgtaaaattcggacttgttagacaaatacttacgcggtttcaacctcaggtactgaatctatcgaattgacaaatttaaccaattgcggatctgaatctttttgtatgaggtttcggagactctttttcaattcataagcatcatcccctgctgtatttattaaatccatataaaaatctttgttttgcagaatcaatgaacggcatgccccatcggaaattacaggtttcactattttatcaataacgtctccagcttgacttttcaaattaccatgcgatctaagccatgtttcgaaaaattgaaactttattgcattgatagtctttttaccgatgcagaaatcatttcttatatcggtaactgtcgatttaatttttcgtttatccaatctttcaactatattcttgaaacaattagggaaaggattcaaactttgagttccagaagcaatatccatcagaatctttttgccaaattcagtcaagttatctggcaaggatttgattttagccagtaaatgttttattgcgacaaaccaataatatgatgtatgtgctgttctttgggcgtataatgtatcaacacttatttcagacaacgcttcgaacgctattttattgatatgatcggtcaggacattgcttattttagtggtcaaatcgtaaaaagatgcgtcaggaattacatctttaatattgttcttagtgatatacttatccaaatcggtattccactctgctaaatgctcgataaatacctcatccgttacacctattctgttcttaatatcttcaaattggggcaatatgtctgagagcaataatttatagccaagtttatgatttaccatgtattgtagtgtttcatttaatagcggtatattccatcccacactatttactaataagtctccatgatccacataatagtccatgagttctgcaacatattttatatctccaccctctattaaggaaacggaatgaccatgtgccaattgcatggcgactaaatcgtaatatccagactctttaatgtttcggccatcagtttctaattcagaatgcaactgatttatgtaggttgaatctaacgttacaggtaaaggtctttcttcgtcagatgccaataaacgataggttgtaaatatagcccctatattatctttatttacattctgttcatcaatgcaattcgtgatcgcttgcaaaagcgttggaaacgtataggtagaattatcttttaacgtttttacaatatctgcatggtcgaaattatcgggtagtaagtttgccaaataattatcgagcgcctccgaatttgttgctacttgataatatttatatgctttagttgtcgcgttatcccgataggcagcatctgttgcatttgcagcttgaatataatcgataaatgtatttggcttgactgtttttgcttcaatcaatgacgtaaaatcgcacgccaacttattttgcgcaataaacctgtctattgcatctaacgttttgaaatagtcgccgccattgaagtcattgaaccgaactatcttcttatataattgagcaatcacatggttttggctttccgtgtctaaatgcaacagcagttcttggtattcgacagggaacacctgcttctctatggattcttttaatttcaattgtgctattctttgccatacacgcagaataacatcgctctttcgagttaatttatgcaaacaatgtataatcttatcgataagcgcattgtccatacattgtataacttcttctaatacagtgtcaaattgtttattagtctctgcatattgatttatgtcgtggtcttcttctccgttgatgcagccttcaatatattttttcaatggaatttgtcgagcatcttcaacatcgacaccatataccaaagctgcaatttcgcgttgtgtttgcagatcattgttaattattgtttgaatgccattcagatagtcgccggacaatatttgttctactggatttgccagaatatccgtcttcttcaaacagaacaatgctatgtttatcatcaaaatttcgttacaccactcttgtttaagagcgaccatctcattgatatatgatataatttccctaacattggcattaggatttaccaatctgaatatccgatttatagtttctttcgcttcattttctgtttctccaaatgcttcaacaaacagtttgttgaatatacttcgatagtcggtaataacaggaggagcaacacgataaacaatagggaaagttttattgataaaatacttggtcagttgtttcgtttgttcgtcggtctcatctccgaatgcacaagctaaatgtgtttcatcgaaaggaataacagcccaaacattttcaaaaccgctatcggcgaagaacgtatggatagaagaccataattcttttactttttcagcggggagacgatccatgttgtcaaaaacaaggactaatttacgttgtcctttttccttgataaaatcagaaatgtcttgcatccatgttttgaactcgtaaaccgttggttcgtcttcgctcaaagtctcatagcaaacgtccttttcgactttatcttgataaatagctaacatataactccatccatatttatgatctttgctatatgcccatttccaaacgcacaatgcaataagaactggcagtgcagctatgataatagacaataaagaaaaccaccatgttgtgggtgtaggttttactgcatacgcaataaatgtaaatatcggagttaaaactgcaaccaaaaatgccgcaaccataccattactgataaggggatatttttcggttacggtctccgttttacgggctaataaatatttcagcttttcagaccatgatacggttttcgtacctccacctttgacttttattgttgcatttccagataggataccatcatcaataagtttgcttgtaagcaattccaatatagagcggcgttgcaagtcctcttgatgtccccatgcgtcatactcaaaaaagtaatagtcgtctgataattcacgttccaacattttaaccacgttggattttccagatccccaaataccttcgatgccgataattcgaggtaaagtacattcctcatccaatgaatcattctgacaaaaatggcgagcaatagtttttgccaacctttcttgcgaacctccatcgaatttgtcaataccacacggtttattttggataaaccgcggatattgctgtttggattgtagttttgtttccatatacgtaatttattgattatacgaactccaaataattctcccgatttaccacatgaaactcggcatagggataggcttcttggaaggctttcggtgcggccggcattttatttccccacttgaactccaaggcggtaagactgtcggcactctcctcaatcaggtcgatttcctgtttgtcgtaggtgcgccagaaatagaactccctgtgcagtccctcattgaagttcgctttgcgccgctctccgatgatgtagttctcccacagcgcaccgacatcctgccgaatggccagcggtgagaaagccccgataatggcattgcgaatgccgttgtcgtagaagtaccacttgccagcttttgtaacctccttgcgtaggttacgcgaataagcccccagacgatagataacgaagaccttttccaataggtcgaggtatttttcaacggtcgtcttgctcatgccgagttgtttacctaactcttcgtaagaaacttcgctgcccaactgaaaagctatcaatcgcagtagatcgcgcatcttgctcgaattttttaagccgtcaattgctaagatatctttaagcaggtatgcaccgacaatatcacgtaggtagtctgttttacgttcatagttctccatcattactacttcgggataggaaccgtaaatcaagcgcgcttcgaggttctggcgggtttcaagtgccgtttccgtctgtgcgatttcccgttgcgagaatggtgtaaggagaaattgcgtactgcggccgaccaacggttcaccagtcttattcagcaaatcgaatgacgaagaaccacttgccaagacacttattcccggtatttcatcaactatcaacttcagaatactaccgatttgtggtatgttctgtgcctcatcaatagccagcaaatcaataccatccaataaatgccgataattggctattgagcgattctccaatagtgctaatgtgtcgtagtcttcgccgttgagcatcatcgtcctacctgaatagttgtccacaattttacgcatcattaccgttttaccaacacggcgagcaccaaaaatcagtactgctttattgggcgcgattcgtgctgtaatcttctcttgaagtattctatttactgtttccataccttataaaatataatgcaaagataatcatatttttttaattggcgaattttacaaaaaaaacgggctattaaatggcgatttttacaaccacaatcttatggaagttgtttcattgtttttagtaatgatatatgttcatactatgatgactcaataatttaccagacatacgtttctgaaatttgtccttataggaatgaaaaactcacatatattgtgctaattaatatataattaaatgaaaataaaaagacaggatacgagtattcctgtcttctcatatgtaatggatatttttttattttctcatccgctccaactcctcatcacgcaacattctctcgttcagtttttcctgcatcctgtcaatgaaataggtgcggctttcgttcttccggcgtttgatatcagtgtagaagcggtagcagtctttagaatcaaccccgaatatcttatagagaagtggggcgagctgtttgagcggcatattgccgttgttgatgcagcccatcacgtctatgccgtagataagttccacgaggtcgatggcattgcccgtccattgaagaaggctggcggtggtttctgttgcgttgttggcggatattagtggtggcacttggggcgtggcaaggaatttctgcatctttcttacgaaagacagagccttgctgacgtaggcggcaatctctcttttttcttctgacagattacgtacgggatggtgctgcaactcgatttcgatgtaggcaagcgcgatgacggtaaggttcatgtccatgccgccgttgcacagttcgatcacttgggtggcgaaagccgtgtatgccgtttccatattgcagtcgccggcttcgtttatcaggcggaaaaagtcggtttccgccagcaagaaataattcatggttctgtcaattttgaaaattacactttgttttctgcgtgcgcacatgaatataattggcaaaaaacgcggcagaaaataaaaaatccaacactcaattttacaaagtgctggatttcagaggtataaaattcagtattttttcacaaggacaaattatctccgacttaaattgtttgtaatcggaacatttattctattcctgaaaatagaaatgtatgcttgccgcacattttggctatcttgcttttttatcaaggatatagataatgcgacatacaccgttgggatagcttttcaaagaggaaagcgtccagtgttgctctggcagagccgacttaaaaaaatgtcgtccgcttccggatatgaaaggaacggtgtatagtatgatttcatccacagcgtgcatccgcagcagtccgtttatatagtctgccgtgtccggtgtggcttccgcgaggtaacggatgtttgtgcagtcttttctccattcgtgcagcattgaaatggaatagtccggtgtcacacggtaaaaggctttcttcctgatttcatcaagaccgcaacggtcaaggcacaaatcctgatgtgctttatcatataactctgaagaaagacatccgtccatcgtcagtacggcgagaatctgaactttacccataatcgtttcctttcgttaggcaagggtaaaaaagtagcgtgcaattcacactaccttcaagcgatggctctggtaaagcctttacggagagtacgtgaatgcacgctatgcgtaagcatagcataagcatcacgcaatcgtctccgtagttccaatttaccagattttcgcttgaaacgccttgcggtcttatcctatatgttggcggcgaaaagctcctgccaatcgccgtttttctcaaatgttatgcaaagatagccaaattcagtgaattacgggctatgattgcttgaatttatatttaagtccatactcttcaagtttgctgtatagtgttgtcctgcctatgccgagcagttctgcggcgacactccggttgccgtttgcctgtttcaacgcacgcaatatccgctccttatcctccgcgtcattgcgcaaggcgaagctgacagtagaggtcggtttcgtcacggcaagttccagatgctctttcatgacaacaccttcctgcgcctgcaatacagcacccataactttctgccgaagttcccgcacgttgcccggccatgcgtgtgtcagcaacgctttacgtgcttcggaactgaacccgctcacgctacactccagctctctgtttgccatatcacggaagaactctgccagcggcataatgtcttcttgacagtcacgcaacggaggaacggttatcccgaagtcgtgcaggcggtacagaagatcctgccgaaaacgcttttcattcaccgatacctccaaatcttcattggtagcagcgatgatgcggacattgaaattccggtctgccttgtctccgaccgggcgataccgcctctcctgtatggcacggagcaacatctgttgggtttccaacgcgaggtttcctacctcgtccagaaacaacgtgccgccttccgcctcatggaaatatcctttcttggcattgtccgcacctgtaaatgcacctttgacgtgtccgaagaaagccgacggtgcaagctctttggagagtgaaccgcagtccaccgccacaaatggcttgcctgcacgtttgctcttgtcatgcaacaggtgggcaatatgctccttgcccgtgccgttctcaccaaatatcatcacgctcatatcggtggcggctaccagccttatgcggtgcatgattttctgaaaggcggaaccttcacgggcgaatataggcatacggcgttgtcctgcctgacgttctttcagtatggaacggatcagggggacaagtttatcctccacaagctgtttgggaatatagtctatcgagccgagtttcatgctttccacggcggtattaacttcggcgtagtcggtcataatgatgaagggctgcatctttccctcctttcgcatccagcacaaaaggtctatgccactgccgtcaggcagacgcaggtcggcaaccacgatatcattatctgttgcctgttgcagatgtttcttcgcggttgagaggtggtaagccttcatattgcggtagccctcccgtgacagcatattgcagacatattcgcaatacacgatgttgtcttccaccacaattatttttgtcttattcatcttcgtattttctcctttcctcttctgccaaccgtattatttccactcccttatccagcacggcagtcacggcatggcttaacgcttcaccatccgggagagcatcgccacgaagcaatccgtaaagtacattcagcggttggtcggcacggagcacctcccacgaactgcgcaggtggtggatcagggaatccagcttttgcaggtctttttcttttgctgcatcccgtaccgcctgcatttccttttctgtttcagttatcaacttttccagcatgacggcttcattgccataggacaataaggcggaaaagtccggtttcccgtccggtgtcgcttttatggcacacctgtcggaaacctccatcagttccgatatggagaacggtttgaacaggcatccggcaaagccttttgccaatagttcccctttgttacaactgcccgaagcggttgccacaaccaccgggattgttggtgaattgcccacgttggacgaacgcaacagttccagcaattcgaaaccgtttatatcgggcatattcaagtctgtcagcaacaggctgtattctttctggcgtatcatttccatcagtgccgcagcatcggtgcaagtgtcgcagtgtattccttcttgggaatacatctctttcagcatcagaagtaatacctcatcattgtcaatggcgacaacatcatggaatttattgttatgataaacaggtgtattgcttgtatatccaagctgttcttcagcttcctgcatagaaatttcaactgtgaaacgactgcctttccctttcttgctgtctaaacggattgttccgccaagcatcgacacaatattacgcattatggcaagcccaagcccgaaaccctcctttgcggcggcatttgatagacgttcaaacgcaccgaacgcttgtttctgttcctcttctgtcatgcctgtacctgtatcttcaacgaccagtgtcagaactccattatcatattcagtaatcaaagaaacaccgccttcttctgtgaacttgacagcgtttgacagcaggttattcccgatttgtattattcgctctttgtcggtcaatacaatggcatcgtgtccagtcttcacggacaaggacagccctttgttcacggcaacaggcatgaactccgtttcaagtgtgtgcgtgattgctgaaatccggcagggtgacagacggggctgttccttgccgttgtccaggcggaagaagtcaagcaaagtgttaagcatatcccgcatacggtcggaggattgcagtatgttttggatatactgcccggacttatcctcacactgttctttccgtatcagtccggcatagcctgttattgctgtcagcggtgtgcgcagttcatgggtgatagtatgtaccgccttcttccttgacgttatcagtgcctcgttccgttgtacggattgttccagttgccttatcaaatcagttgtcttgtgcttgtattgtttaatgctttttgcatcacgatgtatgatgatgtaggaaattaacaacaatagaagaacgaatcccattaaaccgcctacttgcataaatgacttttcacgcatggcaactatttcgttttcccggctttgcagttcggtttgtaccttttcttctatttggcaaatcaattcttgcagttgtctgttaagttctgcattacgagctgcaaggctgtcggcttgttccgacaattggcgatcctgcactttctgttcgctgattacgtttctattgaccgaatgaaggatagtggttgatactgctggagttacttccttttttttgccgaatatgcctaagaaaccttttcgttttggctttttggactgttcctgcacacttttctgtacaataaccggaatttgattggctatcttcttgttaatagattgttgttcatccattaaccggactatctggaacatctgtcgttccttatcctctaaaagactgcgcacactatcgatgcgctctgctggataggtggccttgaaacggcagagcatactgtccattgccatacgccgtgcatggtaatgctcgatatctttatcgttccattccagtattgtttcacccaatagagaaaattttatcatttgaatattgatattgtttatttcttttcggagctcgtctatttttttattgccaagttctaatgcttctatctcctgccattcatagaggctattatatgccatacatccgataagaatggagataagtatatatcccaaccgtattgccttatagaaatttcctgaccgctccattattttaatgacattgatttttggaacatgaataaaagtttatctttttcgttcatgcggatattatcagaataaccgtcttttgttatttgatacccacatggcttaaccataaaaatgcctaagcccttagtgtacgaacttacttctgaggcatagtctttacttgtatttaatggaactttccctttaatatgacaccactcattattacaactgatgtcttcaatctcagacatcagtttttgcaaatctgtaatagctttggaactcgctacttggggtatctgcaactcaaaacagagcatcggttcgagaatgtccacacctgactgttgcaaagccagcctgaagacataaggggtcagctgtctgaaatcagcaggtgtacttaccgggctataatactcggcttgagtaaaagttactttcagatctgtcacttcccatccatgtaaaccagattggcaagacatacgaatcccttcaaaaacggcattttgaaaagaatggttcagataaccataggagatgtcactttcgatttgcaaccctgcccctaacggtaagggttcaagagtcagccctattgtggcccagtaagggttgggtggtacttcgatctgaataatcttattgaccttttttataggtcgttctttgtagatagtcttgatctcatcaaaatggacctttacggaaaatcgttcttccagcaatgtctgtatgatttccttttgggtcaaaccatataacgagatttccaattcatcactatatgagtttatggaaaaggacaaagacgggtcttcaatccacaatgtattcagagcggatatcaccttgcttctctcttcgggcttatttggccggacggaggatttgagagcgggatgctgatgagataatccttgaatcaaacaaggtttagcacctaaataatctccgattcgaaaatcttctatatcttctacaatcgcgatatcattggcacccacttcatcaacatttatctctctgccctgataaatagtctttagatttttaatcttgatgaatttttccgaatcgttgattcttacaacgtctcgaagtctcagacttccgtcaattattttaagaaaacttcttttatgccctttggggtcatgctctatcttatagagataagctgaaagtctgtttgagactgatgccggaggaagtataaaagaagaaatggcgtccaacaactcattgataccgatattgaacattgctgatccatgtagcaccggatagactttggcttttgccacaagagcgattatcgtattccaataatcagccggtgaaatttcgctatccgccaaatatcgttctaatatatcgtcgtcatggttgcatacaaattctttgtattcttcctttatatatgtttgggagcaaaccggataaaccgatccatcgacaacagtttgcataaacaggacatcttgcgacagatttgtttttatatccatatacaaacgctccaaattcacaccggcacggtcaatcttattgataaatataattgtcgggatttgcagcttttgtaaagtactgaacagcaactttgtctgcgcttgtatgccttcctttgcggataagatgaggactgctccatcaagcattttgaatgtccgctccacttccgcaataaaatccatgtgtcccggagtgtcaatgatattgcatttcactccattccagataatagatgtcgtagaagcccggacagtaattcctctacgtttctctatatccatagagtccgttatggtgtcaccattatccacacggccgcacttttccgttgctccactggcaaacagcagattctcggttacggaagtttttcctgcatcaatgtgagcaagaattcctaaatttataatattcatttggattaagcaataatatactacagtagatgcattgtcgaaacgcaccttttaatacctcctcgtagcatatgagaactacaggattactaactcgtattaatatgtatattattactgccgcataacgattacaaaattacacaaaaaaatatatctaacaaaagtgggaggattttttaactttttaccatagacattttattagggaagcgtaggttcaactggcaagtacaaataagtagaaatgtttgaacaacaccgttttaggaagttgaaaaatcaagtttctctctcggtatagcgtttattttggccaatatcttctttagtttagcatttgtgtatttcccattcgtgttctatttagctccttattatgagtatgtagcaagttacttatcaaattcagcctctttgagggtcaaatatggttttgcaaatggtgactgacaagacataaacaaggtcagcaggaattttttacataaatggacatgaatgtatataacctaaaataagaataaattttaataagggctgcccaaaaagaaaaaaatgcagttgccatcctatagatacttgcagaaaggataaaatttacttttagaccttttgggatagcccttattaatacttcagataaaattccttaggttatattttcaatcctttggaccgggtttcctccttggcatacagtcccggacgcccgattatgacatggttggcaacgatactatccgccggactgcgtatctgcggcggtgcattttcgggatattgcgcctgcctgttcctcacatcttccgcttccggcttgagctgttgcccttcattctccttttctgcgacttcgggcgtgggtggcgcaagctccagctgaatttttcggtcaagggcggcaagttcggacttcaactgcttcagctcgtcctccttcttccacaccttacccgctatctcctgtaactgcggtatctccatctccagcacctcgttcttcgccttgtactggtcgatgatggagggtatcctctccatcgcgttgaggaagttgcgggcggcggccaacgggtcagccatcgccagatgcccgttgttgtaggtgtacttgtagttcccctcgaccacgaagcggttgtcggtgaactccaatccctctttgagtatcctttcgctcaccacctttatcggaaaaccgtaaagttcaccgacctgcgtgtacaaccctccggtcgtggcattcttggctatctcctgcaaacgctttccgatgaccttctcatcggcggaatccactccgtccacctttattatattaaggcggttgccctccttgtcggtctgcaccaccgacaggaagcggttccagtcctccgtcatggcatctatgaaagccgtgttgttgcgcaactcgccggtctttgactccagcttgaactccgaatcacgcttgcccttgttgaacgacttgcgttccccttcgagcgatgcgatccgcttttccagtttcgccttgtccaacaggtcggtattgccggagagcaacgccatgtattccgagaaattcatgcccgatttttcgtccattgccccctcgtcgatggtacgcgcacccatcgcaccgcttttgagctggcttatgaaagtctgcttgcagtgcaggaggttgaacttgtagctgtccagtgacttctccaccgcgtagatgattacatccacgttgttcccggcgaaatgtttggcaatctcattacctgccctaactccgcgtccgtcacgctgttgcaagtcggacggtcgccacggcgtatcgagatgatggatagccacacaccgtttctgggcgttcacacccgttccgagcatagaggtagagccgaacagcacacgcaccgtcccggcgttcatggcgtctatcaccgccttccgcgccttgtcggtcttgcactcctgaatgaagcgcacctcgcttggcggtataccgtagtcctccgtcagtttgcgcttgatttccgaatagacgttccacccgtcgcccggctggtatgtccccaaatcagagaaaacgaactgcgtgcctttctgggcgtcgtatttttgataatactccgcgatcatcttggcacagtgactcgctttgttgtcgggatgatcttcgtaattcgggtctatcatgcgcatgtcgagtgccattttccgggcatagtccgtggcgatgagcatcttcgccttttcttccgtttccgaaagcggcagcctgcccaacaaggtggcatcgcccgtcttggcgaactgcatcagtttctgtatgaagtcctcctgttccggcgtgggcggtatatggtgcagtatctcgttcttggcaggacggtcaacgcccacatcctccgccgtgcggtagtccgtgatttcattatagaaggcggcaagctccggcactttgatgaagtagcggaaacgctccttctggaccacattgttcgtcacgttaaattcaaaatccgtcgtcttcttggcaaatatcgccgcccaagcgtcgaaacaccttatgtcctgccgttccagctccttcgggcgcaggtacttgaacagcaggtacaattcagtcagtgagttgctgatagtcgtgccggagaggaaggtcgcacccaagtcttttcctgtgcgctcctgtatggtgcgtatggcaaagagcatgttaagtgccttctggcttccctcgctgtttcccaatcccgccacacggtcgtggcgcgtgttgaaagtcagattcttgaactggtggctctcatctatgaagatgtggtcgatgcccatctgcttgaaatccaccacgtcgtccgtgcgtgactttatggcgtgttccaccttctccagcttcgcttcaaggttgtgcttgcgcttctccaatcctttcagcatcgcccgcgacacgttctttccctgctgccgtagcacttcgaggttttcctccaccgtgtcaagctctgcttgcaggatgcgctgctgcaattccggcgactgcggtatcttgccgaactggtcgtgcgacatgatgacgcaatcgtagtcgttgttctttatattattgaagaagcgcacacggttggcggtcgaaaagtccttctccgaagcgtacagaatacgtgcgttgggatatgccgcctgataggtggctgcaatctccgcaacgttggctttcagcccgataatcatcggcttgtgtgccaaattcagacgcttcatctcatgcgcggcgatgcacattatcagcgtcttaccggttccactggctaagcacgttgcgccttgccgttccgaagaacggcaggtttcaacatactcgcctccgaaccgtacgtacacgtctccatgtatacggctctccgtagttattgtcagtctatttctttccatgaattttacgataacatttttcacaaacagctaatgttttccttttacgggcaatcatgaagcgttcccactccttcaagcctttcaagtctttgagcttgcggacatgaaccattttcaggttgtccgtagccccgcaatattcacactcgcaggctttgagccgtgccataaggctcgtgctctgtgtcccgcgataactgggcagcagatgcgcatcatctatccgcgcttccggcttccatttgaaccctccatgatagagcgtacgctcgtgcatcctgcctttgctgtcctcaaactgtacacggaagattttatcttttgtgtatttgttgactatcttccttactgtcgattcatacttggacgagaatgtcttgtacatgctctctttcatgatgtagtagaaatcatgaagaatattgacattgttggcaagacaatagtaattgtagatacctcgtatctccgagttgtatcgggtcaatatctcaaggtcatcattacttctgaggtaaggacgtgaagtggattcccatttttctttccccctttcccgtattattttcatggctttgtagccaatcagtttatctctcatcacctcaaaaggcagcaagagtacggtcttgtggtcgagagaacggatggcaatcccctttttgttctttctcgttttattcgtcttgcggatagtgacttcatagcctaagaacttcgccctgtcatgaccgtttgtgattagggtcttttcatcggacagttcaagtttcagtttgtcaagcaagaagttcttgatgtcttcctttgcctttacgcagtcttccttgtttccgattacacctaccagaaaatcatcggcatagcggacgtatctcattcgtttgaagtccccgtccatgtcaagagtggcaggatgctgttgcatttcacgatgtagtttctttatctccatgcgcaatgccgctatcttctgcctgtctctctcattcttcagtttctttacacgtttgtcctttcggttgccaatccttttgtattcgggattacgtttccttgcctttccgatattgaatgatgaaatgtattccaccatatacttgtccagcttgtcaaggtatatatttgccagtatcggactaagcacacctccttgcggtgtcccgcagtaggttccgtggaactgccactgttccaaatatcctgctttcaagaatttgcggataagacgcaggaacctctcgtccttgatgcgttcaccaagaattcttatcatgacctcgtggtcgatgttgtcaaagaaccctttgatgtccccctcaatgaaccatcgtgtcccgtcaaacccttccgaaatggaagccaatgcagtatggcaactgcgatgtggtctgaaaccatgcgagcatttctcaaaatgctcctcgtatatggcttcgagcaccatctttatgacttcctgcacaagtttgtcgtcaaaggcgggtatgcctatgggacgctttttgccgttcttcttcggaatatagaccctctttgcaggatagggtcggtagctttcatctttcagtctgtcaatgaggttgtatatgcgtttaacgctcattccgtctatggactgaccgtctgcgcctttcgtacagttgcccgtattgggggcaatgttctgataggctaacgcatataagttctcattatacatcagtcggtaaagccgttcaaacttgtaattcgggtcttggctgtgcccagccagactgtttaatacattctcagaatttctcataatgtctcacacatctttcgttaaacatattaataataacactgtctcccttcgccatgtacaaggctttcccttgctcggactactacggagactctgttgccatgtgggtttccccatttaggcaatccccatttagacatatagtaacatagcgtgatggattgtcggatgcggttttcgtccttttccgcttatcgcggctgtgttgcaatcggttttcggctctctcactcgaagtcggaaagtggaagtattgcaatctgacgtttgtaactatcttatcatataatgaccgtcagagtttaccagctaaccacttggactgccgttcaaacagtatagtcttcatcctcatatccatcgtttcatttagacattcagtagcagcacgatagttagctgacttatgccgtttccaacatgcgacactccccaccgcctttcggctaagtggataagttggctaatgaccggcgttgaaaacccttgccgggtaggctgctaaacctacatttactatatgcccttatgggcgcagcacctcgtggtcgcaaattccgccgccgttctgtttcaacatccagacgcaatccatctgtgagggatagacgctcttgataccccggcttgccagccctttcaggttgaggtcgggaaaggtctgatgggagccgtcgtagcgcgggcgcacgaaacagttgaacttgcggttatacatcgtcacaagccgctccttgaactgcggcgactgctcttcgagccattcggagaagccgtttcgtatctcgtcaatcttggcgttggcgagttgtattccctcgctgtcgcgcatcttgatgtcgttgccatgctcgtccttgccgatggacttcatcatgtcagggcaggtgttgtgcagggcgtgttttaggaggtgcataccgtcatagttccggtaataccccttcaccagaaactcgtccgtgattttcatggtgcggtagccgcacaccaccgaaaactcgtccatgcttgcggaataggcgattttcacctccgtgtcgaacagccggctcatgtaggcggcatagacacccgtcggaatccagcgttccccgaaattgaagtccagatcctcgaaggcgatgcgctgcggctcggcatctttcagagcctccaacgcctgcttcacctccggcatacgctcattttcgggattgtcacccatccatgcctctatgcgttccgctttctctatgacatttccggcgatgaaacggtctttgatttcgtaaccggtcacgagcggattgtagtagatgcgcccttgcagggcagtgagcaaatcctccgccgtgctgtcggttatctcccgcatatagtcgagattgaccgtaccatatttgttgagcgacgcagacagggcttcttcgggagagcctacgttggcatggctctccaccgcgaaggaaacaggatgctcgaagatgtccgccttgacgaactttccgttttccatccgttccagcgaaaggatgtcgcgcccgcccgcatccatcatcactaacttcacgttctgcttggcgttgaggttgccgtagcgcatgacaaactcatcgtaacaggtattcagatgctctcgccacggaacatttgcctcgcgccggagcgattcataacggtacagacgctcgtaggcgtcacgcagcgacacatacaacaacgccttttccttctggtatcctttcaggtcgagcggctggaatgtcgccccgtatggcgtgatgtctttcaggtagccgatgttatgacgcccccggtcagccaccagcgacccttcgcgcaggtgcatctccggcgtgcggtggtaggcacgcggagaaaggtccacgacttcctccttcggcttttccgcttcgatgtcggggaaaaggaaagtccccaccgcttccgatggggtatctgtaacggcaggtgcggcgactgcctccggctgtgtttcctcctgtcgtggctgctcacgggaagtttccggcacggctttcacttccgtcttttccgccacttgtttctcgttatgctgccttgccagttcccgaagttctttcctacgctccggcgtcaaacccatcatcatttcatagaaaccgttgatgggaggattggtatcccagtccagtgtggcatagatgtcgtccgggtcggcaggcttggcggtgttctccgctttcacctccttattctccattgcgggttttgcagttggagctgtcggtgtaaccgtgactttcggtttgggcggagtggactttgccgtaactgcctttttcaccgtctttttctttttggaggttttcggttggctgacctcttccgtcatcccccagaggtcaagcagggtgagctgcacgcctgcggaatattgcgggcgcggttctatctccggcttttcatctgcgggttgcggcttttctgtcggagtttccaccgtctgcgccgaggatactgtttccaattttatggcaggacgctctactttattttgaacggcaactttttcttccgttcctgcctgccggattgaacccgaatacaagcgcatggcaagcctgtaatggaaatcctcgtcgagcatacggcgcaaatccccggcgatgcctgctgccttgccctcgtgcagataaaccatagcgggcttcccgtaggggtctgtgtcaagtttcgccatcgtatgcacgatgcgttccgggtggtggatgaaataggcgttgtcggtcagggcggttttcgtgtccgtctgtatcacggtcatcagccgctcgtcctgcgacatttccttcttgctgaggttcttttgcaggacaatcaggtcactgcccacctccgtgcccgcgttgtccgtgaacaggttgttgggcaggcgtatcgcggataccagattggcctgactgaacagctcgttacgcacggaggtcttggtgctattcaataccccttgcgaggtgatgaacgccacgataccgccgtcacgcacggcatccagtcctttgagaaagaaatagttgtggatggttttctgggcggagcgtctgccgaaagagtcgctccgctgaaactccgcgtcgaacacggcaatgtcaccgaacggaatgttggacaccgccaagtcgaaataattgttgaacggtctttcgattttctcaaaaccgcaggtgcgcattttctggtcgggatagagatgcctcaagattgtacccgtgagcagatccttctcgaaagccatcacatccgcattggggctgtgccgcagcatggaatccacgaacacgccgacacctgccgacggttcgagcatacgggcggggcggacgctgtaatctgccagcacgtccgcgatggtgtcggttatctctttgggggtgtagaaagcggtcagcacggacgctttcagcgaatccacaaaccgcttgtactctgtttcgtccttgctgttctcacggataagcctgtgcagctccaccgtcggggcgaacagttcgaggtcggatttcgcccaccggacggcatccgtcagttcctttgcagggttgaggatacatttcagaccgccgaaaccgcagtacctttgaagtatggcacgctcttcggttgtcgctgtcctattttccctgtcaaggatgaatgccgtccgtatcgcctcgatgttgtcccgcagtttctgtttgcggttaaacgccatattcgtctaagtaaaggacggttgctcccgtcagctccgtgtagagcaggtcgtaatcggaagacagggcgaaattgtcatccgagaggtcatagacggagaacacgttgccgacaagcggcagcagtttcaggacaaaggcttcacgcttctcttccggcacttcatcggcaaactcgttttccacgacttcgcggaggatggcgtaacgggaataatgcagcccgcgcagcagcgtgtccatcgccagttcctgcgcaccatcggcgggatagccttcaagccgtgccctctcatacgtttcggcggcacggtcggcccgttcccgtatgaaagcggtgtcgtcagcctgttcaaacttgttcgtgcggagatagtccagcaggtacagaccgtaataggaaaagtcggtctgaccctcgtttttcttcttgttgttcattactttggatttagcggattgataattaacgggataatcggttggaaaaaggaagaaaaaggcactcggtatccctccgagtgccaccactaaatccaaagtatgagtgtaatccggtatcgaagaacaattcattactctgaacaagtggcaaagttaatactatttcttccgtcctgaaaatttcttgtcctttttagcctccgggaacacaaaagtcgtgttatattccccgtcaaaggcgacaacagcatcgaaactcttgccctgtttgctcttgaaccctttgagcagcttggtatgcccttcggtgagcaggtctttgatttcatcgtcggacagggtgcgtcccgctttcagccggaacacgggcagtccgcactccgtgttgtcgcagcgtaccaccttgccgtagaaccgcatcctgcccgtgccacacttgggacacgcgcagccggagtcacggctgccgaagagcttgtcgcacgagatcagttcggaggttatctcacgtgtgtacgcctctatctccttgcggaaggtgtcgtcggacagttccccgcgctcgatacgcgccagctccttttcccattcgcccgtcatggcaacatcggcgatgcgcatcgtcttgacgacggaattgagggcaagtcctttttcggtgggaacaagcgacttcttgcagcgttccatgtaaccgcgcttgaaaagcgtttcgatgatggaggcgcgtgtggcgggagtaccgatgccacagtccttcatcgcctgccgcagtgcgtcgtcctcaatttccttgcccgccgtttccattgccgagagcagggtggcttcggtatgcagcggcttgggtttggtctttccttcggtaatggacgagcctttcggtgtcagcgtgtcgccttcctgccagccggggatggtaatttcctctttttcctcgccatagacggcacgccatccggtttgcttcacgacgctgccttttacggtaaactccactccggcacattccgccgtgacagtggtcacatccttgacgcatttctcagagaatgcctcgaccatgcgcccggcaatcatctgatagatggtattgtcctctttggagaggaagagcggtttctcacccgtgacgagcagggcatggtggtctgtcaccttgccgtcgtccacgctgcggcgtgtcggggcggcttttgcccgcaccttgtctttccattcgggctgtgtgccgatgaaagcgagcagtttgggaatttcggcaaacacgtcttcggggatgtagcggcttcccgttctcggataggttatcaacttcttttcgtagagtttctgcgcgatttcaagcgtctgttccgccgtgaagccgtgcttggcgttggcttctttctggagcgtggtcaggtcgtagagcaagggagtttcctccgtcttctccttgcgctcggctttcgtgacagtggcgcaacctgccgcctttaccttattatatagttccatcgccggttctttctctttccatttctcggaggatgagaatttcacgacttcgccgtcgcaaccgtccgttgcgatatggagctgccagaatgcttcggacgtaaagcggcggttctcccagtagcgttcacataccatagccaacgttggtgtctgcacccgccccacggaatacgtgccgtgtccggcggcgatggataacgcctgtgtgccgttgatgcccacgagccagtcggattcgctccgcgctttggcggcgaggtagaggttgtcgtatttgctgccgtcttcgagtttccgcagtccctcgcggatagctttgtcggtgagagagctgatccacaggcgcacgaaaggagtggtgcaacccgtatagtggtagaggtagcggaagataagctctccctcgcgtccggcatcggtcgccacgatgatatgttcgcttgtgtcgaacagtcttttgatgacttttatctgcgacaccacgccgctgtcgggcttgtaacctttctccgtcctgacctgacgggggacgagcgtgaatgtgtcgggaataatcgggaggttgtcacggacaaatccgcgcacgccgtagccgtcgggcatggcaagctgaacgaggtgtccgaatgcccatgtcacggcataaccgcctccctcgaaatatccttcctctctctttgtcgcgcccacgatgcgggcgatttcacgtgccacggagggcttttctgcaatgattgtcttcatgtcttcttcttttttgttgatactttggattttattttggattcagtggcggacacgggattacattttcatgcccttgcccgttttcttctgcggcttctcctgctgctgttgctggcgggcgtccttcgggttggtctgacctttctgcaacggctctctcagattctttgtagcctcgttggtcttgccatcgttgttcaccgccacctgcgtgcggctctcgttggacggagcaacctgctgtgcattgtcagggttcgtgtcgtagcggtacgggcgtcccttctccgggttgaacttgatatacatcgtggcatggaagccctgcttgtcggtcacgttctccagcttcacggctttacccgccacatagtcggctttctgctggtcggtgaagctcacgccgctccatttgctgatggggcggatgctgccgtcctcgttcgtccacgtgttgcggcgttgctccttcttggtctgtgcggcattttccccgccctgcgcctgacttttcgatgtgtcgcctttggtttcctgtgtctgtgcggtacggggcgacttgccggttcccggcacgaactccacgccgcgctgctccacgttcacttgcagggtggtgacgaactttctgccgtcgttgcgctcgatgagcttgtcgcgtacgggcagtccggcgcggagcatgtcccgctcctgcgtggtgatttccgtcttgccgatgcgctccgggatgcgcaccctgcttgccggaatgtccgtgatttcattcgtcttgcggtcgatgctgatgtaggaggggatgatctcgcccgtttccctgtccacaatgtccacgaccctaccgagattgcccgtttcgcggaggttcttccggtcattgtcggagaatttgtgttccttgtactcatccagcttctgctccttgcggatgaagtgcggcacgaggctgatgtttccctcaccgtccttcttgaaggagaggcgggcgtccagctcgaatgattcgccgccgaaggtcggtttgacctttaccaagtcggacttgccatagttgagcatcttcgtaaggtcgccggacttttcaaggttgtcccgctttacgccccatctgtcctccagctcctgccagttgattttactctcgtcgatgggctggtagccacgtttgccctgcatctgttcggatttgtcctgttgctgttctttccgttgttccatgttctcctgtttttgaggttcttgtttctctgtctgttgtgctgccatctcttcctgcaccttcttctcatagtcggaggtgtccaccttgtgaggggcgagcagctccttgttcgcttcggggtctttcagcagttgcttcatcacctctaagagattttcagcttggtctgccgcaatgcggtagaaaccgaagcggctgggttccttgcactgccggaagaagttcttgaagaagttgtccagcacgtcgccatgtcggtcgaattgcaggaaactctgcgcgttctccgcttttgcgggggtgcgcttgggtgtgccgtccgcgttcagcccggctaccacgctgatctcgcctgtcttctcgtcacggactaccagcacgtccttttcgtcttttttctttgccatctgaaaaatgttttaatgggttatttatgaaagaaattatggatacgagccttgtagaaggctatatcttcctttttgaagtccttgatatggttggaaaggaatgtcagcacgtcctcctcgctgtaataggtcttcttgcccagcgtcttgtagggcaatgcgcctacgctgcggtagcgttggagggtgcgtttgcttatctggagcaacatgcacaaatcctgattgtcgaaaaggcggatgctttccgtgatagtgggctgtttcccctcagccttcatcgccagcagcagttcgtcctgacggtcgagccgttccatcagcttctgcatccagccctcgaagttgtttcgtgtgagcagttccatgacctatgtcctccttccttttggtttgccgcccgtgcgcagcgtgtggttgtggaacagggtgtctattgtcccttcctcgttccttactgtgttgtcctccaatagccgcagtatctcggaaaggcggtagcggcagcttccgcgtaccaccacatactcgatacggtggtcggtgcgcatacgctgcatggtgcgcttgctcacgttgagcatcttcgccgcctgtgccgtgtcaagcagcttgtcttcggtttcccgcttccgtttcttctcgtcccttgcctcgcggatgtaccctgcgatgttcgcaatctgcgccatcatctccttgtaggcggaactttccattgttatcactttcatgttcagtcctttctttttgtttctgcgacaaaattcggcaataaacaaaaggggctttaacaactcactacgtgactcacgtaagatttttgcggaagatggctccgtaacccggtcaaacggcgcaacaggcagcctttcagcggaaaacgatacgtcttgtatgccgtttcgttacctttgcggcaaactctaaatgacatgaatatggaaatagtatctatcgagaaaaagactttcgagatgatggtggcggcattcggcgcactctcggagaaggtcgccgccctgaggcgcaaaagcgacacggggcgcatggaaagatggctcacgggcgaggaggtctgcgggcagttgagaataagcccgcgcacgttgcagacgctgcgtgacaggcggcttatcggctactcgcagataaaccgcaggttctattacaagccagaggaggtgaagcggctgataccgcttgtcggcacgctctatccgcacggcagatgatttgatttattcacccactgaatccgaagttatgatgaacgagaacaacgatgtttttacgatggaagacgagccgatagcctctgtggtgcaggatatgcgcaaaggctcgaaatggctgtccgcatttctggaaagctaccgtcctccgctggacggggaacgttacctgacggacggcgaggtgtcggaactgctccgtgtgagccggcgcaccttgcaggaataccgcaacaaccgcgtgttgcccttcatacttttgggagggaaggtgctttacccggaaacggggctgcgcggggtactggaagcgaactaccgcaagccgctggagtgaggcggtttcatgaaaaagtaaacgggtgacaccttttgtggtgctacccgtttacttgtcttatggggtatgtgcaatcagcaatacccggcttttccgttctgtatgaacatcacgtatgtctgccgtttctcttgtgagagtgcctttcccaccagccatgtgcggaacaggtgggtgttgtaggtattcaccctgaaagcgaccgggatgatgatttcaagggcgtacacgtccgcgtgcagcccgttttcaagctgcatgtagcggcacacctcgtagtcgttcagcacgtccgacttgcggacggctctgatggcggcgttcactgccgggacggtcgtatggaacaatccggctatttcggtggcggtcatccacacgtcgttaccggttacgctgactgccttgtcctcgatgatgattgtgtcacgtttcatggcttttctttttagatggtgcaacctgcaaattcctcgacgccgttcaatcttgcggcaaggttctccatgtcctgattgagcttctctttggttatctttgcgtaaatctgcgtcgtctttatgctcttgtgtccgagcatggagctgaccgtttcgatgggaacaccgttggagaggaatatcgtcgtggctgccgtgtggcggctctgatgccacgtgatatgcttggtgatgccgcaacgcttggcgacggcacggataccggcaaggcacgtgttataatgcggaacgggaaatatcctgccgtccccgcacagtccccggtatttgccgattatgcggttggcgatgtcgagcaggcggatgttggacaccacgcccgttttctggcggttgatgtttatccactcgtgttcgtcgaagtaggtgcggatattctcttccgtaaggttgcgcatatccgcgaacgacagccccgtgaaggcgcagaacaggtagaggtcgcggtacaattcctgtttggcgtttttcagtttcccctccatcagcaggcggatctcatctttggtcaggaaactgcgtgttgtttcctccttcttgatttcatactcgcggaacgggtcgcgcgtcagccactcgttgttgatggcgatgaataccatcgtccgtaacgggcagacgtacagccacacggtattggtgcagcagtgcttgtccgtgcgcaggaacatctcgaagtcggagatgaaagccggggtaagctcttttagggcgatgtccttcacatggtagcggatgtcgaggaactcttgcatgtgcttgtaaacggtgcggtacttcagcagcgtgcctttggctttcatgcctgcctccacctgcttctcgtagtcctcgttgtgctggcggaacacctgcatcagcgtgtggtagcggtgttccagtccgagaaaggcgttcttcaccttctccgccgtgacgaagttgtcacgctccatgatttcctgataatgcctgttgatgcgtacccgcatcttgtcaagcatacggttcgtttcgagtgccgccgtgcttctgcccgtgacacgtccacctttggtgtcccacagtttcggatcgacagtcagtttgcagctgaactgtgtctggctgccgtccaccgtgatgcgtcccatgacgggaactgtcccgtcctttttcactacctgacgcttgaggtagtagattactgaaaatgtactcttcattgtccttaatttttgggtttcaaaattagttggtgaagagtccggtgttggtacgcaaaacggggaggaacggcgcaatctttttccgtaacctgatttttcgcatgagttatggataactcactattccttagagccttgtttcgctattcgtacccgtttgtcgcattttcgggcatggttacgaacaagtaacgtagcggcgtcaggatttggcttcggcagggattgtaatggcttcacggattatcgccacttcaaccaaaacccttgtaactcaattctatcactatatctttccgcatttcacttttttgtagtaactttgctttgtaattcaatccgtaaatgaaacttgattacatctaccatagcggcttcgcgattgaagcggacggagtgacggtcattatcgattactataaagattcctcggaagaggttttcaataaaggtatcgtgcacgactatctcttggaaaagccgggcgtactctacgtactatgctcgcatttccatcccgaccacttcaatcgcgaagttctttcatggaaaaaacagcggcccgacatccgctacatattctccaaagacatcctaaagcaccgccgcgcctcagcggaagatgccacctatatcaataagggcgacacctacgaagacgaacatatccgtatccaagccttcggttccaccgatgtgggtatctccttcctgatagacctgcagggcaggcgactgttccatgccggtgacctaaacaactggcactggagcgaggaatctactccgcaggaaatacgcaaggccgaaggtgactttctggccgaagtgagagctctgcagcaaactgcacctgccatagatgtagccatgtttccggtagacagccgtatcggaaaagattatatgcgtggagcagaacaattcgtggaacgaataaaaatcactatatttgtaccgatgcacttcagcgaagattatcagggaggcaacgccttccggcagtttgccgagagcaagggatgccactttctgagcatcgcacaccgtggtgaaagtttcgaactccccaacttgtagcccataattcgtaaattaataattaaaacacatactattatgaaaaatttgacacaacttctttttacactgttttgcctgtgtctgccgaccatgctgcaggcgcaggatagggacgacagtaaatatctggccggtgccgttcccgaggtggacggtaaagtggtattcaccaaagaattcagcatccccggcatgtctcaggatgaaatctacgaacgtctgctcggctggatggatgaccgtctgaaagagaatgaaaataacagccgtgtagtattctcagacaaagagaaaggacagattgtaggtatcggggacgaatggattgtattcagttctacggctctgtcattagaccgtaccaaaatcctttaccagctgactgtgacctgccaacccgaaaagagcgtgctcgaagtagagaagatacggtttaactaccgcgaaggaaaagaaaaatataccgccgaagagtggattgtagacaagtatgccttgaacaaggcgaagaccaaactggtacgcggacttgccaagtggcgcagaaaaaccgtagacttcgttgatgacctttgcctgggagcagcagaagcattgagcgccaccactgccaaaactccggtagaagaaaagaaggaagaaaagaaagaggtgaaggctgtcgtcaattccggtccgacagtaatcaccccgaagaaacaagttaccgtggaacccgcccaggctactgaaaaggcatccgaaggcgtcgtgaaagatgcccaagtcatcgaagtgccccaagtcaagaaacctgccgcactggttcctgcccaaaagaaccagcaacaagaatatacgaccatagcccccgagcaattgtcagccgatgccatccagaccggagcaggcaaattggttatcgtcatcggccaagagcctttcaacatgaccatgatgacagcaaactccggaggttctttgggcaaagtcaacggcaaaccagttgtattcagcatactatcgcccgaccagccgtatgaacaaatggaaaaagcagaaagctataccatccgtttctatcctacgggacagacagagcctacggtcattctggaatgtaagaagctgccctcaccggcaacgatggaaggtatgccacgcacgtatgtaggcgaaattctgaaagcaatggtcaaatgaccgcacacgcagactataaattgtaaataatcaaatcagaaataaacaaatggaaataaaaagtaaattcgaccattttaatatcaatgtcaccaacctggaacgtagcatcgcattctacgaaaaggcactggggctgaaagaacatcataggaaagagtcgtccgacggctctttcactctggtctatctgaccgacggcagtaccggctttctgctggaactgacctgcttgaaggatcacccacaagcctacgaattaggagagaacgagagtcacctctgcttccgcgtatccggcgattacgacgccatacgccaataccataaggaaaacggatgggtatgtttcgaaaacacagcaatgggactgtactttatcaatgacccggatgactattggattgaggtattgccggagaaatgatattctactttattaaaacaacgaaatatatgagtatagaagaagcgatgatgggtggtattgtcttcaaaggcaaaaaggacaaacctaaagaagaaaacaagataaagaccaaagccaagaagaaaacctacattaccgggcaacacggttccgcctcagccaaaatgaaagcagaaatccgccgcaaacgcgctaacagacataagaaatgataaatacagccttattgcctgccgacaaggacccgatgggcgcagccatagccgattacttcaaatggcataaagccgaccgcctacgcgtgttctcttcacaattcgatgaggacgaaattcccgtcgaagagctattccgcacagaaaagcaaatgcccttgctggagcgtactgctctgcaaatggcaaccggaaggattctggatgtgggtgccggcagcggttgccatagccttgccctgcaagaagccggaaaagaggtccatgccatcgacatttccccgctttccgtggaagtgatgaagcagcgaggtgtgcgtagcgtgtcacaaaccaatctgttcaatgaacactttgccgatgaatacgacactatcctaatgctgatgaatggttccggcattatcggaaagttggagaatctgcctgattttttccggaagatgaagctgctgctccggcctggaggctgcgttttaatggattccagcaacctgagctatctgttcgaagaggaagatggcagtattgttatcgaccttgccggtgattactacggagaggtagacttccagatgcaatacaagaatgtcaaaggagactcctttgactggctctacatcgacttccaaaccctgagcctttatgctgccgaaaacggctttactgcagaactggtgaaagagggtacacattatgactatcttgccaaactatcccgacaagcataaaatgaagtgccccctaaaggttagacaaaaacttttagggggcacttcgtttttttatatcttgcctatgcctgctattcagaaagcatcccgtcaatctccttcaccagagaagcaaattcttcagggttatacaaacgtgtcagcttcacaatacgcccttccttatcaattaggacattgcgtgtgatgcctgccttgcggagcgcatacttcgcaaatatatccgctcccgggtccagacccaaaggataggtcactccggttgacttaccaaaagcaatcactttctccaacggctcgtcacggtcaatgccaatcagcataaaatccggattcgacttatgcttcagccaaatatccttctcaatgaaaggcatctccttacggcacactccacaccagcttgcggtaaactgcaacatgaccaccttcccacgaagttccgaaagggtaatgcttttcccatccgtcagcttcactgtaaaatcaggagccatctcccctaccttaacgatgtagccggtactgtccgccactacatcctgtgccttgcctgccatgctgcacatagcaaacagacagaaaatcagaaatcctacttttttcattttattcaatctttaataagtaagctgtaactattcagcgaatgatattttatagaatgggcaaacaattccctataacaaaaaactccgaaacacttttaaaaagcagtttcggagttttattcttcgaggtacctggcagattcgaactgccgtacacggttttgcagaccgctgactaagccactcatccaaggtaccggttcttacaagaactctttatttcttgtttgcggatgcaaaggtagcactttttttgaaactaccaactatccgcaacaacttttcttcttttttttcgtcactccactgcactccgcacgcttcttatcatacaaattctttagttcacagccacttgcacagctatcacacggattaccattttctttgacccgatgaaaaaaagaataaatactcatgccaatccgcacagcgcagagcaacaacaataaggctactacccactcctgccaactattcatcataaaaacagacctcctatctgataaattgcaaaagacatcagccaggccagcgcagtagtataaagccccgcaaacacggcccacttccaactgcccgactcccctttaatggctgccaacgtggcgatgcacggaaaataaatcagcacaaacaccatgtagccgaaagccaccaggggcgttattggaatgcgttcgctcaagcttacggcatctgcctcggcatcgtcggcataaagcactccgagcgtgcttaccaccagttccttggcacccacgccggaaaggatgccaatacccagtttccagtcgaatcctaacggttcgatgaccggttccatggctttaccaatccgaccgatgtaggaattttcctgctgttccgtcacactttcatattcatcgtggttgggataatatcccaatgcccagataacgatggatgccaccataatgatacctcccatcttgcggagatactgcgctcccttctcccacgtatggcggaagatggccttggacgtcggcatacgataaggcggcagctccatgacgaacggtgtatcgtcccctttcaccaggaagcggcagaaaatgcgtgccatgagcactgccaacagaataccgatggcatagattaccaacagcacaaagctcgcattgttcgggaagaaggcgcctaccagcaataaatagatgggcagacgggcgctgcacgacatcagcgggttgatgagcatcgtcaccagacgactcttgcggttctcgatggtgcgcgaagccatgatagcgggaacattgcagccaaagcccataatcagcggaatgaaggactttccatgcagccccattttatgcataatcttatccataatgaaagcggcacgcgccatatagcccgagtcctccatcaaggagatgaagaaatagagcaacagaatattcggcaggaatacaatgacacctcccacaccaccgacaatgccatccaccagaaggtccttcaacggtccttcggacatgttgttgcgtatcaggtcgcccaattcgcctaccagccactcaatcccctgcataggatagtcgcccagcacaaaggtgccttcgaacatcagataaaggaaaaggaagaaaatgggatagccccatacgcggtgggtaacgattgagtctatgatttgagtggtccgcgacgtatcctgatgattgtccacataggtctcgcgcagggcaccggctataaaaccatacttggcgtcggtgatggcctgctcgctctcctcgttcatcacctcggcaatccgtgcctcttcccggtcgcagacggcaagaatttcctttccgttgggcagctcctccacaatctttttcaagtctccgtcgttctccagcagcttgatggcaaggaaacgcgtggaatatttgtgacggatgttctcattgacgctaatgacgcgcttcacctcctcaatgctacgctccaactctggaccgtgattgatgtggatatggcggaaaaagccgcgcggctgttccacctcttctttatggctgccgaaatcatggtcgggaacatactcctgatgccagctgcgaaggtcattcaatatctcgctgcgtatccttcctttatggtcgaggaaatcgcacccttcgtaaatattgataatcacatgaaacagctgttcgatgcccttcccgctacggctgaccgtaggcaacatcgggactccgaacaactggctgagctttacataatccagcgtatttccactggcttccagctcatcgtacatgttcagtgcaatcaccatgcgcacgttcatgtcaatcagctgggtggtgagataaagattgcgttccagattggaagagtccacaacattgataatgatatccggcgtttcattgatgatgtgccgacgaacatagatttcttcaggggagtaggccgagagggaataggttccgggaaggtcgacaatacggaagtgatagccctggaagtcaaaatacccctccttggcatctaccgtaacgccactgtaattgcccacatgctcgtgcgagccggaagcgatgttgaaaagagaagttttaccacagttgggatttcccaccaaagccacatttatagtgcggcgtttgccgagggccagttgcttcagctcatcttcgcccagatgcatgttttcgcccagcccctcgtggaaatcgggctgcacagcctgctccttggcttcctgctcactgataatctctatcatctcagcctcctgccgacgaagagaaatctcatatcccattactttgtatttgatagggtcacgtaacggagcattcagcaagacctccactgttttacctttaataaatcccatttccacaatccgtttgcggaaaccaccgtgtcccagcacttttacgattacacctttttcaccggtattcaattcggacaaacgcatagtctttctgcctttcttttctattttgggggcaaagataatacttatgtccgcaaggcacaaataatttagaatgtttttaaataagcagacacggttctttcctttaaaggtgttccccccccttaactcctataaatgaaagagccgtgataagcgaaagagaaaagattgaaccatcatttaattcccccaaaagatactgaacaataatgcccaaaaggcagaacactatttccagagatactaaatcgtaacttcaccacatctttgttcttttcttaccacagttgtggtaagaaaagaacaaagatgtggtatgcataaaacacagctgtggtaagattagcttttagcaaatacgaccttagccgataaagattctgaaaatagatacttgcagatgtggcaataaaaatcgtttgcactatctttgcactactctatagtcgaataagttgaatatgcagaaggtagtacaatacatcgagcgccacaaactcttctcgccggacgacaagatacttgtggcactgagtggcggggcggactccgtggcgttactgcgcctgctcctcagcctgggatacacatgcgaagccgcccattgcaacttccatctgcgcggagcggaatccgaccgcgacgagcactttgtacgccagctctgcctggagcaccgggtgacgctgcacaccgtccatttcaacacagagcgggaagcaaaggaacggcatatctccatcgaaatggctgcaagggaattgcgctacgcgtggtttgaaaaaacaagggaagcatgcagtgcaaccgtcattgccgtcgcccaccatcaggatgacagtgtggagacattgctgctcaatctgattcgcggtaccggcatcaacggattgcggggcatacgcccccgaaacggacatatagtccgtcccttgctctgcctggacagaaaggaaatcaccgattatctggaaagtatcgggcaagcctacgtgacagacagcaccaatctgcaggacgaatatacccgcaacaaaatacgcttgaacctgcttcccatgatgcaggagataaacccctccgtcaaggaaagcatcctcaaaacggcagagcatctggacgatgcggcctctatatataatataggtatagaagaagccaaactgcgggtcaagacatcggaaggcataagtatcaacgccctgaagcaagaagcggcatcggaaacggtcttatttgagatcttgcatccgcttggattcaacgccgcacaagtaagggacatctgccggacattggacggacagcccggcaaagtctttactacccccggctggcgtgtcatcaaagaccgcggctcgttgttgatagaacccgtacaagaagccgtaaagccgctactggaaataaaagagcatccctatacaccggatttcattattccacgcgacaaagccaccgcctgctttgatgccgacaaactcaagcatcccctctcgctgcgcctttgcaagcagggagacagtttcgtgcccttcggcatgaaaggacggaagaaggtaagcgactacctgaccgaccgcaagttctcccttctgcgcaaagaacggcaatgggtactttgctgcggagatgacatcatctggctggtgggagaacgggcggacaaccgtttcagaatagacgaaaaaacccggaaagtgctggttgtatcaaccaccggccagtagccatcacagaatgattctgtcctccttctgtttcttgaagcaatcggaaagcaatacggcaaacggcgtgtcatacgtgcgcgccttctgcggacagcctttcacacaagcacaacacttgatgcatttctctgcaaccgtgttacactcgtctccttttataatggctcctgcaggacaatgcttcacgcaatatccgcaatgcgtacaacgttccgcatccacttccggagtgcggggcataggcaccccactcttacgcaacttgacgactctgcgcaaaaagcgtagcaacgggaagaaaggctggcgcgggcgctggatacgggccacatccactccatacagtttctccatatcttcggctgccgcaattttagcacgtatcttttcaccaaaaagctttgcatactccaaatcgtccgcatccggacgtccggccgctaccgggtatttctcactgctataagagtgctcgcctacaaacgtagcgcctgcaattaccttgaaacccaacttcgtgacaaaagcatccaattccaccaaagccttctcataggcccggttgccgtaaaccaccacaaccacggcaggtgcaccgtcagcacgaagctccttcattcgctccaatgccaaaggagccacatgaccgccatatacgggcaccgtgatgaccgccaaagcatgggaaggcacctcccttttacccgccgcttccaaggtgaggtccactttggagacagacgaaattcccgttccgtgaacaattgcctctcccacttgtttagaggtacaagtaggtgaaaaagttatcaactgcacttcatctatattcataaaccaatccttcatgttgttgttaatacagcaaagataaagttttaaatttaaaaaaaagatgatttgtttatgaaaccaaaaaaatttattacctttgcaccgttgaaacattctgcgacttcttgctgtggcgagaattgtttatcagatttccggttcaataataaatatcccatataaatcatatatcacaaggtaaacttgcccaagttgcttcctacaacaactgcaattgtgcacttatgcctttcaataaaagtaaattttaaaccattcacatatatactgtatgtataacatcattcaactgaacgacaaaaatttgtcggaactacaaactattgcccaagaactgggtataaaaaaaacagactcactcaaaaaagaagaacttgtttacaagatacttgacgaacaagctatcgcaggcgctaccaagaaagttgccgccgacaagctgaaggaagagcgcaaaggggaaaaacaaaaacgctcgcgcgtcactgtaaagaccgtaaaaaaggaaggtgccgacaaagtgttctcagccaataaaaacggagacctcaccaaagccaaaactgaggaaataccggctgcgaaagaacaacccaaaactgtggaagcaccccaagaaccgaccatagaagctgcaacgctggcgccagccaaagaagccgccccccaaaaacgcaaaccgggacgtccccgcaaggtaaaggaagaggctgccgcaccccaagcaacagaaaccccgaaggttgccgaaccggaactgaacttcgaggctaaagctccgaaaacagaacctcaagcggaagctaaaaaagtggaagctaaaaaagccgtgaagaatatcgtaccggacgaaagccctattctggccgaggcggcagatgacttcatccccattgaagacctccccacagaaaagatagagttgccttccgaacttatcggtaaattcgaagcgaccaaaacagaaactcccgcaactcccactcctgccgttgcccctgccgaactacaaccgcaacagccacaacgcccacgcctccgtccccgtgacaacaacaacccatataataataacaacaataataaccgtaccggtggctataaccaacagcgccccgcgcagcagcgccctgcacaaccctataacaacggagagaactatcccgccgctccggaacgcaaacccgtaatagaacgcgagaaagcgtacgaattcgacgacatcctcaccggaaccggtgtactggaaatcatgcaggatggctacggcttcctccgttcctccgattacaactatttgtcctcaccggacgatatttacgtatcacaatcacaaatcaaattgttcggcctgaaaaccggtgatgtggtagaaggcgtaatccgtcccccgaaagaaggcgaaaagtacttcccgctggtaaaagtatccaaaataaacggacgtgacccggctttcgtacgcgaccgcgtaccgttcgagcacctcacccccctcttcccggacgagaagttcaagctttgcaaaggcggatactccgactctatgtcggcccgtgtcgtagacttgtttgctcccatcggcaaaggtcagcgtgccttgattgtagcacagcccaaaaccggtaagaccatcttgatgaaagacattgccaacgccattgccgccaatcatccggaagtctacatgattatgctgctcatcgacgaacgcccggaggaagttaccgacatggctcgcaccgtcaatgcggaagtaatcgcctctaccttcgacgaaccggcagaacgccacgtgaagattgccggcatcgtccttgaaaaagcaaaacgcatggtggaatgcggacacgatgttgtcatcttcctcgactccatcacccgtctggcacgtgcctacaacaccgtatccccggcttccggcaaagtgctttccggtggtgtggatgccaacgcattgcataagcccaaacgcttcttcggtgcagcacgtaacatcgagggcggtggttcactgaccatccttgccactgccttgattgacaccggctcgaagatggacgaggttatcttcgaagaattcaagggtacgggtaatatggagttgcagctcgaccgcaacttgtccaacaagcgtatcttcccggctgtcaacatcgttgcctccagcacccgccgcgacgacctgctgcaagacaagcagacactggaccgcatgtggattctccgcaagtaccttgccgacatgaatccgatagaagccatggacttcgtaaaagaccgtctggagaagaccaaagacaacgacgaattcctgatgagcatgaacagttaacaataactgcatacagatattgtacaaaagcttccatttacgtccataaacgtaggtggaagcttttgtatatccgttttttcatacatagaaaataagtaaaaagccctcaaaaaacagaataatatagataattatcagtgccctgaccggcacttccattcttttcgcccatccactgcaagtcttcaataatattctgcttcaaaagaaggcagttaaagggattttttgtacttttgcgcctcaataagagtaatttgtaatttagtaattgtaattagatactatgttcgataatttaagcgagagacttgaaaggtcgtttaaaattttgaaaggtgagggtaaaatcaccgaaattaatgttgcggaaaccctgaaagacgtacgtaaggcacttttggatgccgacgtgaactataaggtagccaaaaacttcaccgataccgttaaggaaaaagccttgggacaaaacgtgctgacagccgttaagcccagccagctgatggtaaaaatcgtgcacgatgaactgacccagctcatgggcggcgagacttctgaaataaacctcgactccaagcctgccattatcctaatgtccggtttgcaaggctccggtaagacaactttctccggaaagctggcccgcatgctgaagagcaagaagaacaaaaagccgttattggtggcttgtgacgtataccgtcctgctgccatcgagcagttacgcgtactggctgaacagattggcgtacctatgtactcggaaccggacagcaagaatccggtagccattgcccaaaatgccatccaagaagccaaagccaaaggctacgaccttgtaattgtcgatacagccggtcgtttggcagtggatgaggagatgatgaacgagattgccgccatcaagaaggccatcaatccggacgaaattctgttcgtagtggattcaatgaccggtcaggatgcagtgaacaccgctaaggaattcaacgaacggctcgacttcaatggtgtagtattgaccaaactggatggtgatacccgcggtggtgccgccctttctatccgttcggtggtaaacaagcccatcaagtttgtaggtaccggtgaaaagctggatgccatagaccaattccatccctcacgtatggccgaccgtatcctcggtatgggtgacatcgtatctttggtggaacgtgcacaggaacaatatgacgaggaagaagccaaacgcctgcaaaagaagattgccaagaaccagttcgacttcaacgacttcctgagccagattgcacaaatcaagaaaatgggtaacttgaaggaacttgcctccatgataccgggcgtaggcaaagccatcaaggatatagacattgacgacaatgccttcaagagcattgaagccattatttactccatgactccggaagaacgcagtaatccggccattctgaacggttcacgccgccagcgcattgccaaaggtagcggtacgaatattcaggaagtaaaccgcctgctgaaacagtttgaccagacccgcaagatgatgaagatggtcactggcagcaagatgggcaagatgatgccgaaattaaaaagataagataatagcctatgacactgattgatggaaaagcaatttcagagcaagtaaagcaagagattgcagcagaagtagccgagatagtggctcgtgggggtaaacgcccgcatctggccgccattcttgtaggacacgatggaggtagcgaaacctacgttgccgccaaagtaaaagcatgcgaagtttgcggattcaagtcctcccttatccgttacgaggcagacgttaccgaagaggaactgcttgccaaagtacgcgaattgaacgaggatgcagatgtggacggtttcattgtacagcttcccttgcccaaacatatctctgagcaaaaggtgattgaaaccatcgactaccgtaaggatgtggacggtttccatcccatcaatgtgggacggatgtccattggtcttccctgctatgtatccgctacccccaacggtatccttgaactgctgaagcgctatcagatagaaacttcaggcaagaaatgcgtggtattgggacgcagtaacattgtcggcaaacccatggctgccctgatgatgcagaaagcttatcccggcgacgccacagtaaccgtatgccacagccgcagcaaagacctggtaaaggaatgccaggaagcggacatcatcattgctgcgttgggacaaccgaactttgttaaggcggaaatggtcaaggaaggtgctgtcgttattgatgtaggtactacccgtgtgcccgatgcctccaagaaatccgggttcaagttgaccggtgatgtgaaattcgatgaagtagctcctaaatgttcattcattacccccgtaccgggaggcgtaggtccgatgaccatcgtttcccttatgaagaatacattgcttgccggcaagaaagcaatctaccaataacaacgtaatgaaaacgctcgtcgtcttcatgactgtcttactgtatagcgtaaccctttcctcccaggaaaggattacgctattatttgtcggtgacctgatgcagcaccaggcacaaatagacgcagcacatgtatctgaaggaaaatatgactactcctcctgcttctccctcataaaagagcaaatatcccaggcagacctcgccataggaaatctggaagtcacattggggggcaagccctatcggggctatcctatgttcagcgcccccgatgaatatcttcaagccataaaggacgccggattcgatattttactgacagccaacaaccactgtctggaccgtgggaaaaaggggatggagcgtaccatacaattgctcgactcctccggtattcgttacgcaggcacctacaagaatctgtcggagcgcaggcaacgctatcccctgttcatcaacagaaacggctttcgcattgctctgctcaactatacttacggcaccaatggtatcaaggctacctctcccaatatcgtaaactatattgataagaataccatcctgcaagatatccaaagtgccaaggcacgccaaccggatgccattattgcctgcatgcattggggaaaggaatatcagtcccttcccaatcgtgagcaacgcgagctggccaactggttgctccaacaaggtgtaacacatattatcggttcacaccctcacgtcattcaaccgatggaactacgtaccaacggtaccgaacagcacatcatagtctattccttgggaaacttcatttccaatatgagcaaggccaacactgacggcggccttatcttcactttgcagttggagaaacatcctctcccccaacccatccgtccctcttacagcggtcagaatcagacgcccctaccagactccaatcctctgccttttccatactgtcgtgtttcctattgtggatataatctggtctggaccggccggccgggacttactaaagaaaaaaattacattctttatcctgccagttttcctacagaacatttaactccggaagctcgtaaacacctggaaatcttcgtcaaaagctctcgaaagctgctccagcagcacaatatagatatctacgagaagaaaaaataatgcagaaatctcaaaaaatttcgtctcattctttgcaatattaaagattatccctatctttgcaccgcatttaagaaatgcactaacatggtggctgtagttcagttggttagagcgtcagattgtggttctgaatgtcgtgggttcgagtcccatctgccacccgcaaagaagaggaaattcgaaagaatattcctcttttttgttattgtccaaacaattcccctcaaagggaggcaacgtggaatcaatgtaaaaaattgtagggatactcctcacagagtatccctacatcataggaaggaatcaattacctaaaccagttcttgtacaaaagagtttactttctcaaaatgttcaaaatagctggaaacttattccgatattttgcattctgtatcaatcacacttaatagcacttccttccttactttatcaagccagtgataagataaccctttatcaccttatagaaataagaatacaaaagaaatatttcatctttcaaaaaacattctataccaacactctactattttcgatttccgtcatgcaaatataaccctttttgtttatacgaaaagcaaaatcagttatctttgcaaagatgaaactcaattaaacatgaaaattctttggatagacctcaatagctcgtatgcacactcttcgttggcactccctgcactgcacgcacaaatagcaaagaacaattccgtaaaatgggaaatcgtatctgccaccatcaatgaaaacgtaggaatgattgtcgacgaaatataccggcaccaacccgacatcattgccgcaacgacatggttgttcaaccacgaacaactgttgcacatcacggcgagattaaaagcattgcttcccaatagctgcttcattttgggcggacctgaattcttaggaaacaatgaagactttctgcataaaaaccctttcatcgactgtgtattcaggggagagggagaagaagcattcccccaatggctgtcttgctggaaccagccggaaaaatgggacagcattccggggctttgctatatgaatcctcaaaagcaatatatagacaacggcatagcccgtgtactcaacttttcccgactcgtaccgccggaaaacagcagtttcttcaactggagcaaaccattcgtacaactggagactacccgaggctgtttcaacacatgcgcattctgcgtcagcggtgaagaaaaaccggtgcgcacactgtccattgaaagtatccgtgaacgccttcaaattatccacagccatggaataaaaaacgtacgcgtcctcgaccggacctttaattataatccgcgccgtgctaaagaattactgcaacttttcctggaattcaacccggacatatgctttcacttagaaatacaccctgcactattatccgaagagctgaaaaatgaattgaaaaagctacctaaaggattgctccatctcgaggccggtattcaaagcctgcgcgaaccggtcctccaaaaaagccgtcggatgggaagcctggaggactcactgcaaggtcttcgtttcctatgttccctacccaatatggaaacacacgccgacctcattgccggcttgcctctataccgcctatccgaaatatttgaagatgtgcgtacacttgccggatacaatgccggcgagatacagcttgaatccctgaagttacttcccggcacagaaatgagaagaagagcggaagaactgggcatccgatattctcctctccccccttatgaagtgcttcaaacaaatgaaatcagtgtcaacgagcttcaaacagcccggcaactgtcacgtcttctggatggattctataacacaactgcttggcaagccatcacccgcaagctgattctggatgacaacgacttcctacgtcgctttctggaatttttaatcgataaaaatcttatagaccagcccatgagcctggaaaagcgaggtctcgtactctatgaattctgcagtatgcattatccggcctataaaatcatggtcaccattgcctggatagaggctggcatgtcattaaagaaaaaaccagcagagaaagtcaagaccaagcgccagatgccaccggaatattgggaagtcatctatggaaactacaaagaaagcctccgcttatgttttctacccattgacgacaatacccaaaatggttattggttcggcttcgaatcggaaatacaaaaagcagaaccagtattcaaagccaaaggaataatggagaggtgtcaaaatacacaatcaccgcagattaacacagataaaagttcctgattatcagaaattctatagcaatctgtgtaacctgcggtgagttatgccctcatttcttctcctatccgcagtggaaatacttctcgaccagtttcagcatctcctccggactgtcctgtatctctgcacgcaaggttctatcctcgtaagaacgcagtttagagataaccccatcaaccattgcaggactgaacacatggtattgttcaaagacagcacgctgtctttccaagcaatcggcagaagcggcacaactatcaggaagctgttccagttgtttcaacttatcttcattttctttcttgtggatatttacattgacatatgttttttctgcaattcctaaagcatcgtctatctcaaatccataacggcaagctacagcaagtccggcaatcaattgatacaaatcggccgaaccgtcaggcgaacgcatttccaccgtctgtttctgtgtagtatcataatgacttggggtctccaacggatttgccaacatgcacatatccgtttttgccgaccagcccaacggaacgcgtaccaataccgaacggttgcggtcgccccagcaaatgttggtcggtgcttcctgatgaggaaccagacgaaaataggaagtaggatttgtattaccgaaagccgtaatggaagaagccagcttcatcatgcccgcaatggccttacgggctgtttcagagagtgccccatctttcagcatctggttctgcccgtccttcatgatacgcatatgtatatgcaatccggaaccggcttttcctgccgtgattttcggtgcaaaagtaatgttatatccatactggctagccagattacgaataacccattttgctatcaccagttggtcagcagcctcctcggcacgcaccggcaggaattctatttcattctgctcataaatcttatcgtccagcgtaaaattaccgacttcagaatgcccatactttatctgtccgcctgcctgcgcaatatatgacatacattccgtacggaaatcattgaacttggcataaggggccgattcgtgataaccacgctggtcggtagccgggaacaatccgtcattttcagaaatgacataatattccaattctcccatagcctgaaattccatccccgtaaccgtagtgaatgcctgacatgccttacgcagggtatattccggagaactttccagcggttcaccatccttattgaaataagaacagagcattgacagtgtgggcaattcagaaaaagggtctataaaagcagtccgaaaacgcggcactacatacaaatcactgctaccggcctctataaacggaaacaagctggaaccgtctacgcgttcaccacatgtaagtatggcatcaaggtatgcctcattattgatgacaaagttcagtgtcttcagtctcccgtctgccgcaggatacatgaagttcaccatacgaatatcgttctcctttatataggaaacaatgtctgctttcgtaaattcggaagccggtttttgaagggcagccaccaatagattggggctcatggataattcctggttcataatacgctgattgtttttagttttctatatggttaacaaaacacatgcaattttctgtcacaataaaaaactgctgtttcgcaaagatactaaaagttgtatcagaaaaaaaacaaacaacctaaatcttatcagagagcctcaaccttttccgtcgtatccccacttcacgtaaatagccccccaagcaaatcctgctccgaatgctgtaaaaatcagtttatccccctttttcagcttatcctcgaaatcccatacacacaatggaagcgtgccggcacttgtatttccataccgttctatattgaccattaccttttcgggagatactcccaagcgttgcgaaacagcagtaattatacgcatgtttgcctgatggggaatcacccagtcaatgtcctccttcgtcaagtgattcctctccatgaccgcctcacaagcatccgccatattggccacagcatatttaaagactgtacgtccttcctgataaatataatgcatccgattgtccagtgtatagtaagatggagcacatacggagcctcccgctttgatatgtaaaaaaggcagacctttcccgtctgttctcaatacggcatccattactcccatatcctcccgggtgggttccagcatgaaagcagcagcaccgtcaccaaaaataggacaggtagcgcggtctgtataatcaatcaccgatgacatcttatcagctcctactatgacaaccttcttatattttccggaacgtatgaaattcgcccccgcctccattgcatacagaaatccactgcaaacagcctgcatgtcaaaagcaaaagcattgttcaggcccaatttgtcacataagatggacgcggtagaaggaaagtgataatcgggagtggtagtagctacgataaccaagtcaatgtcattcgggctggtctttgtgcgctgcatcagttgtttcacagccttacgagccatatatgaagttccaagcccctcctcatgcaaaatgcgtctttcctttataccaatgcgccccataatccattcatcattggtatccaccattttagatatttcatcattagtcaagacatagtccggaacatatcctccaactcccgtaatcactgcattcaaattctccattaatcctatccagtttagtgtaaaatcaggaataaccctattataaatatgctatcagaatatcacacttttttcagaatagtcgtgtgacaatctttaattaatgggcgcaaatatacgaaaagagaataaaaatcaatgaatctgacaacaaaagacattaactgtctacaaataataacactttaaaacacaacgggattcactactatccgagccctgcaggaatacttccgcataacctttctgcaaataaagaacaaaaaatccgctacctgcaacgatgacgcacgattggccgcacaaccgggcacatttccttttccagcgaatggagcatcgcaggcggttggatggaagttttgattactcacatactcataaccgccatacgtccaatgcgtgtctacattcccattatccgggtctggcatatcccacaaagaaacaccaaaccgtgtataccggcggggaatggggaagaggagataacctttcttcagtatctccgttgtcatggggctcatttctttttccatctttgtctattcttaattcgataacatgacaaaggtaagggaccagccaaggggatacaaataaacagttagaatcggctaaaaattaatgaaataaataagatggcggaagagggactcacctcatcctccaccaccctatataataatatactaaaataatcagaatgtattagaaatacattctctattttgcatatttttattaataaaacatgttgcaaagttagaatgggagagacgttggcggctgccatgccatgaaggatagcaccctcaaagttacttttcaattcactaatgatttcacctttataggtaatacaatcctttttaagaccaagaactttgccaaacaagcaattgtcttcttcaccgtattccacgctaccgaaatgtcctttgtactttaactgtcctatactattttgttatcttttgttctttactttattaatatttctcaatcagtctattctcacgaatataagttagtaattgttcatcacatctcctttcattatattcgacggatgcggcttatgcattatatacgaatttttccatccgaactaaccaatttacttcctacccccaactcctccccttcctccttgaagtagcccagcaccttggctggcgtgagacggcagcgttccacgcttttcaagcggctctgaaagatgtagcgggagcgcagcatgaggtatatagttcaagctacggtgcaagcggtgctgaaggcaggctctgacatcttcagcggagagtttcattcctttgtttggggttgctttcattgtaatggttattttagaattgactgttgatgtgacggatttgcaaaacgcatcatccatctgtgccggatgcataatgcacaccgggcaaacggatgatgcgttgggagcaaatgcacgttgcgttttcgctgataaagccttaatgagcattaagggttgttatataatataatattaaccgctgccggtttggaggttagcggaaaacatgtacatttgtaatgtgtttttcatagtattagatttaaggttaacaaaagattggctgtctgggatagatggccttttttatgttgttttctgacctgcttcgtaggattaagtttttaatagataaatactttaaggcaggcacaaggggataaaaaaagtcccacaaatcattggatttgtgggacttgtgtgtttactgtccgtttttttcggttaattcagcggagagacaggtttctgaacttgtcagcctattctctctgtatatcagcgttataacatcaaggtaaagaacaaatgtagcaaaattgtagcacatttctgaaggctttttgaaacccttttgaatgcctatgccatcattttatcacggttcaaagatactaaaaaacgaacacattgccaaatactttataataaatattttcagccactccactgctacactttttagtgcaaggtgcgagcctatttatatatataggcttgcaccttgcactaacggagactgtgtgtggcattgcaccaatgacttcatttacaaacaacgtcttactgccaaaaacttatatcagtcatctcccggttatggttaatcatttgagaccttacaatatctgtatcatccggaaggttttgccaaagaaattatgtatatgtttatgaaaaggctttcttgagacatttatgcttttcaaaatatagtttatacagaccttacctattgactatctcctattcggaaatagttgaaggtaaattagtgccattagctcctatagtgatgctaatggcactttttgacgccaattcactactgttcctgttgattttatgtctcttatattatttccctgaattttttgttgaacttgcttctacggaaatattttgtgcccaagagacaagaatttgcctgtttgggaaagataatctccgcttagaagctactaactttatatttatggaaaatataggaacaatgctaagaaagcaacgtgaattgaaaggtttttcacaagagtatgtagctggtttagtgggtgttagtgcctctgtaatttcaaagattgagaccggtaaaaccaaggcaagatttgatgtaatcagcaacatttgcaaggctttggacatgaattggtacgatttactttccccagaggaaagacgcagtaaagaagactgccggatcaacctcaatatcaacgtttccagcccgcaacaactgaaagaataccttgacatattgggaaaagacaaattgcaaatcaagaacctaaagaacaaatagtatggaagtgataacgatagacagcattgcttttcaaaaactggttgaacagctcaaccggattgaaagctacgtggagcgtacaacagagttgtatcgtgatatagacgatgccttggaaataagcaccaaggacctgatgaccatcttctgtatctcagaatctacgctgtacagatggcggaaaggaggttccatcagtttcagatataccgaaaccggtggcgtacgtttttcatacagttccctgttcatggcaataaagtgtttccgcataaagattccgggtatggcgaaggaggaagcactcaaacgactgtctgattataaagacgggattcttctgaacaaatgcacaactgaaaccaaatgatagacaaggaagatatactggaacgcacaggccgcgggcttgccgtgttcaaacattacatcaactttccggtgagacccggaaaaaatttcaggaatccgctctacgaagaccggattgcttcatgcaatatctattatgaccggcgtgcccaagtgttcaagatgaaggatttcggaaataacgaatattcgggagactgcttctggttcgtcggcatgctttacggattggatgtgaaaagagactttgtcgctatcatcaaccgtattatatcggacctgaacatcaccatagtccacacaggaaacaacgatatgcctgctcgtaaaaaggcagtagaaaaacgtatcattatgaatgagaatgacaatccaataagaaaggactaccatacagaggttaaacccttttcagttgctgaacttgcatactggcagcaatatggaatcaagccggatactttagaaagatacaatgtacattccttaaagtcatttgaaggctataaccgttccaataaaatttataaaatcagttcatctgcaacagaacccatgtttgcttacatgggcattggatttaccaaggtataccggcctcgaaatcagaatatgcggttcttttatggaggagagacgcctgaggtgtactgtttcggtctggaacagctacccaacaagggggacatggtttttatcaccggaggagaaaaggatgtaatgtcacttgcctccaaaggattcaatgccgtttgtttcaacagtgaaacggccgccatacccacttcactgattgagatgtttgaccgtaagttccgtcatattgtctttctgtacgatatggacgatacaggccggaacgaatctgccagacgcatggatgaattgtcctcgtttcatgtactcagaatggaactgcctatatccggagcaaagggagacaaggatatttccgattactttgcttccggaaaaagtgcagcggactttcaggtactgattacctccatgctggaaaagctttactcacaaactatgatgcttttaaaatcttgcgaaatggactacaacaatcctcccgaatcttccaaaacagtggtttccgtcaacggagtaccgcttgggacctacgacaaccttctatgtataacaggtggtgaaggtaccggaaaaagcaatttcgtatcagccctgattgcaggtacacttgctgacgacacacaaaacatcgacacgcttggctttgaagtttcaccaaactactctgataaggccgtgctgcactatgataccgagcagtctgagtttcagttattcaagaatctgagcaagacaatcaaacgtatcggattacctgcaccaccggatttttatcatacgttctatctggcccctatgtcaagaaaggagcgtatcagcatgatccgtgacagcatggatttgtattaccaccggcacggaggaatccacctcgttgtactggatggcattgcagaccttatccgctcggccaatgacgaagcggaaagcattgccattgtggatgaagtgtaccgcctggccggcatctacaaaacctgcatcatctgtgtgctgcattttgtgcccaacggaataaaactgcgcgggcacatcggctcggagctgcagagaaaagcggcagccatcctctccattgaaaaggatgagaatcccgcctattccgtagtcaaggcaatcaaagtccgtgacggcagtccgttggatgtacccatgctgcttttcacatgggacaaacagaaggatatgcacgtatctgccggtgaaaagccggccgaagacaaggagaaacggaaaaaggaggagttgcagggcatcataaaagaaatcttccgaagccggaagaaaatcacgtacactgaactcgtaaccgaactgacgcaggcgatggacatcaaggaaaggacagccaaaagctatatcagctacatgaaaacgaacggtatgctgaatcaggacagttcgaacaactaccagccttgatgcttccgccattgggaaaagtcaatctaacaatttaatgcttatgagagaaatgaaacctacatgcgacccgaacggggtctattccgtcaaacgtgtatgcgccgagctgggcataagctacaagacactccggaaatacagggaaagcggctatatcaagccgttgaatccgggcaatgtctatcggcctaagtattccggacaatccatcattgattgctggcatgtcctatgcaccctctgaaacaaccagcagacttggactcccaccacaccagtccaagtatgttttcagaaaaaagacacaaagcgaaattctatctttggttttcagataaggattccgctttgtgtcatctataaataacccgtgagcagactcatgggtcttcatctaaaacaatcccgtcatgtatgcaggcaaacagaaaatatccttgtcttttcttacatcttttgtgtagagaagatacctttgcaggattcttgaagaaaatttctcctggaaaacatcaagcgacttatgggacttatatccggaggacttcacttcaataggacatatcttatctttgcgggaaagcaggaaatccacctcatagttacggacagtcttgttcccgtcttcgtccttgactatttcttcctggaaagtatagtagaataattcattgccggcactcttgagcatctgggctatcgcattttcatatacataccccagatccacagcaagcttatccgaaagaagtttctggtatatcacattttctgtataatcgcgatccataaaagcgagtgtaacgaacagtcctgtatcggcaaggaacaacttgaaacaatcataatcggcatgaagggaaaaacctacactggggtcatttgcatgataggaaaagtttaccgtcatcgaatccgccatatccatcagcaactcacccagtctggaggcagttgcattctcaatcacgcttcccacctgataacgcttcgaatttcgggagagttctgcaggtattgaagtaaacaagcgtgaagcacgtcctgtcgggtctattttacggaaatcatcaatatagagttcgagaatattacgctttaccgcatctatggctgaaaaatcattcgattccaaataagcatttacggcctgcggcataccacctataagcatgtaaagacgaaaattacgcataaggtcacgattgacagcatcacccaatgattttaagttttggtatgagtatctaatcaaatcgtaggtttgggatttattgacagcccataaaaactcttcgaaatccaacgggtacatagagatacgtgtttcttcactcggaattacgattcctttcacattctttttaatggaaagaagtgaccctgtttcaatatagtcatacctccggtccttaaccaagtgcttgatggcttgtcgggccggtggatacagttgcacttcatcgaaaatgataaccgattttcgttcatgcaatgaaacattgaatagtgactgaatccgcagaaaaaagtaatccaaatctgaaatatgggagaacaattctttgactgctgcatcagctattgaaaaatcgatgttgatataggagtcatactctctacgggcgaactcctcagcaatggttgattttccgattcgacgtgcaccttttatcaaaagtgcagtctgtccatcactttcctgcttccattggagcattctttcataaattttgcgtttgaatattttttcggacatatactgagagtttatttgattacaaaaatacacaatatgtcgaaatcagcaaaatgttttcggcagtttttgtcgaaatcagcaaaatgtttttagcggtttttgtcggaatcagcaaaatgtttggcattaaaagagattgacgacagtcatccccctcttccgagcctcacggcaagtataataagtccctcctttctgttttccgtcataataggcaatcacaaagtttgaatgctgcagcatgaagtcatttcgtctgagcagacatcctttataataggtatcactcaacacaatcaccttgtctgccttggcaagtatatggtcatatcgttgctgttctgccaagttccaacggctgttttgtcctctgaacggcacaacagctatcagttgcagataaggaaggcgagctctgagggaaagaacttcctccgctgcgagcatgtcgaaacccaaagccatcccacagatacattggtactttccttccttataagcaagagaaacggcctttctgagccgttctctcaccttatctttctgttcgggtgcaatattccgatgccctgtaaaggctatggaagcctcctttatcgtaaatctttgtttcattgtctgtttactttatagtgagttttagccaggaagatgcccccgataacatgtgcgcccaaattctccaactggtcagcataggtagcccatgtgatgccgcgagtgataacatcatcaaatgtcactacggattttccactgaaccaatcttcatcaaaatcgatgatatgcactttgcggatttccttttccatcttccggttttcatgaatggcaagccgtccgccgattacccttacatgctcatagccgttgatagctccggtcagctcacaaaccctttcacaaaaagccttgtaacggagttcgttctttggacttgtggatgccggaacttgaacaaaaacaatattcttgcaggattcgccatattgttcctgcatgcttgctgcggtcatttgcgctaccgcttcaaagcttcttccgtctttgaaatcgtacaccatctgtctgtcggcaatttccttttcaccgacgttgcggatgcgcttcgggaaatacttgcagaaccatgtctgaggtttttctaactgcttcttgaggtgattgtccatgtgtgccatacgctctgatttttttccctcttgttttgctgttttgcagcttgtccgaagggatgttttttgcttttctcagagtgctggcagccaccaattaggcaaattcaaggcagaaaatacgctcaacttgtttgaggaagattttctgcaagggatttgacgtttggtggggacagcctacctttgcaaaaaaatatcctcgtaggcagagatgataaaatagaactgtcaccgtctataccaatcctgtttctgaacttatacatcccataaacagaaatcgcaagtcattcccatataaatcattcaggaaagaccgaactcaccttggcaacaagtaatgagtaatacaaagtctttcaaaacatcacaatatccctcattatcaaagattttacctattgtaagaatggacctgcatgagtaactttacacccaaaagaatacttatgaactatatacagcaaatacaaacgattgtgatactcccggaaaaaagatattccgtgaaggaagcctgtatcttcctcggcatccaccggtgtaccatctatgactacatcagacatgaggaacgtccgcttccttttatccggatccataccgataaaagaggcatcgtattccagggaagcgacctgcttgcctataaagcggcaggtctccccaagaaagggcgcaaattcaaagacagcacatctcggtagaaggctgtctttgaatagtagtagaatgtgggggtcagttccattggttccagggtaagcctgccagcaatgactttccgtcagcttccctcagttcgcaagccagcagccacgcatcagtccggatggcatccatgtcgtttaccgcctgctgataccgggaaggagccatagcacctgactgtatcatccattccccggcacaagcctccgggtcaatggcatccacaaaggattcaatctccttgataaggttctctaactttctatctttcatttcagcggtgaaggaaaacggaacaccgctcaaggttttccgatggaagtcaaagaaaagactgccatctacatattttacagaaacggtccagccaagcaaggctgcaatgctgaatacatttttatttctcataagacataaagctacatacagacctgccaagtccgtgatggatatggcaggtcactttcttgttacaaatcatatgttcaataacccattcttgcaaggaactcctgcaaacggctgtcacgcaactttttcagtggcaccggatggaagttttcctgctgccttacttgcagcttgccgaagccttgtttggtcaaattcaactcaatgtccgaaagttcattcaaggaaatgtagccgtactcgtcctccatcagtccgattacgataccgaagaggatagtgtcgtttccttctttttcaccttcaagaatgaaccaccgcacaccaccgagcgcaaagatggcacggcaaatagcgtcctttcccttgccgtcctgggaatagagaggaaagcctttcaaggcttcctccaactgcgttgtcataagtctgcacatatcaatccaaaattatttcgtctttataaacatctatttctgcaccactgctgaactgaaccacaaaaccatgttcagagagggctacgatagttcctcggtggtagcctcgccaaggggttatcaactcgcattgtctgccgtattcgggaaaatcatattcgtccatagtcctgtcatttagaggttggaaattcgcggtcaaaaatcaagtcacactcaatgagccgttgataggcttctgcagaaagccgtgatgcccactcattgcggtcatcgtatcttccctgctgatagttgtgtgccagctgcttcatgaagccgaggaacaccttgaacatctgctgttgcaggtagcggtgagctttggtcagttccctgccagtctggtcaggtgaacacatactgccatttacaaagttggcgaactcttgtgcaaaagccttgtcacgttcggagatggtagctccggataattcgggataatccatagttaaaacaatttagatggttgcgattccgattcttctccctcttgtgaagccctttagagcttcttggtcgggaaaaccgtttttcgtgcagttcctcactgcggacaacagggagaataaggcaagtgtgaggtccgaggactttacggaatacccaatttggcacaaattgtggaaggctgccggaaagtcctcagtccgaaagcgtcagcggcacttgacgtttctcccgtctgcagtacctttgcacgtataaaacgagttggaccaagaagctccaacggttttcaagactttcccgactaggactccaagggaaagaattagttctaacaggtcatctcaaatatattcctcagaaagtccgcgtaacccagtatcccgaccgtcttgaagatacacatccccaaaaaccgttgccgttgtgagaacctacaaagtgaagcgaagtggagccttgcaggttctctctatggcaacggattggagttccattcgcagccaaagccaatcagacgagctttgcttggtgtcacggacacggagcaaaacggatggtacatccttcccaaaaggtcgtcacttccggcatcgcatacaatacgattagtcggaagtggcggccaacatctgtgagctaactgtataaaccattcgatggctctacttccgcaagcgtcagcctgcgttcggtagagccatcgagtaaatcatcatttgaagagcagcagcctaacctcattgacattgtgagaaacaactgagtggagcgaagtgaaaccctgttgtttctctctgtggcaatggactggaacttccatttgtagcaaaagcctatcagccgagttttgcttggtgtcactgacacggagcaaaccggatggcacatctttcaaaagaggtcgtcacttccggcatcgcatgcaatacgaatagtcggaagtggcggccaacatcagtgagccaactgccaaaaccattcaatggctctacttctgcaagcgtcagccagcgtttggtagagccatcgagcaagtcatcatttatagatatgttttccaacctcattgacactgtgagaaacagctgagtggagcgaagtgaaaccctgctgcttctctctgtggcaatggactgaatcttccatttgtactaaaagccaatcagccgagatttgcttggtgtcacagacacggagcaaaccggatgtcacatctttcaaaagaggtcgtcacttccggcatcgcatacaatacgattagtcggaagtggcggccaacatctgtgagctaactgtataaaccattcgatggctctacttccgcaagcgtcagcctgcgtttggtagagccatcgagtaaatcatcatttgaagagcagcagcctaacctcattgacattgtgagaaacaactgagtggagcgaagtgaaaccctgctgtttctctctgtggcaatggactggaacttccatttgtactaaaagccaatcagccgagatttgcttggtgtcacagacacggagcaaactggatggcacatctttcaaaagaggtcgtcacttccggcatcgcatgcaatacgaatagtcggaaatgacggccaacatcagtgagccaactgccaaaaccattcgatggctctacttctgcaagcgtcagcctgcgttcggtagagccatcgagcaaatcaccgtttgaagattagctttccaacctcattgacactgtgagaaacagctgagtgaagcgaagtgaaaccctgccgcttctctctgtggcaatggactggaacttccatttgtagcaaaagtctatcagctgagctttgcttggtgtcaccgacacgaagcaaacctgatggatttttctctgtacaaaaatcctctcatctccataaaggttcttgttcccaattataaggaaaacctagcagacgagtgtttactgaagggtattttatcaaaagttgtttgaaatcggcaacaaaggtattgtctgggataatggaattgagccaatataccagatagcataattgtggataaagagtctgttctcgaaaagaaaaatctgtaatccatttattaggcatacgctccggcattttaggctttacaggaaagactcggtttgacaatcttgaatgatgggcacagcaattacgaagcacggcaagacactccaaccagcttcgcaagaatttgtgatgattcaagccgaactctctcgctacggcatgtttagcggtagcatccgaaaagttagaataaagtttggatagtgtacccattgaaataacttccaacgttttccatacagggggaagatcaggttcactgtatttacgaaaatgctctgttataaagtcatcatgagaacgcgatacttccttacggatgacagccagatttgtagcaaaacgatcgtcattaagtgcaaaagtttcatccataaaccaaaatgcaccaaaaccaggggaaaaatgcttgattattttcgtcctgaccgaaacttctattgtttgaatagcagtaaacagcaatgctcgaagttacttatcaaaagaatacaacttcactatatctgagaaacaactgccttccctaaattaatgtgtgaaatggtctatttcaaagtgtttccaatagccagcaagacggaaataactgatggtatcaagaagatcaattgcttgctctatatcatcaataagcaaacctctttcttggagaatttcaatttgctgttcagtggttatggcttgatttgtatatctgactcccataaataaaaaatgtcccgctgggtgcgctaatcttacgggaagcgggcgggatttgttgttgcaaagataacatatttattttaatctaccaaggctttatttatattgtatcttgtttcctgcaaatagtcccaatttttagtacaaaagcattatctggcaggtcggacgaatttatagacctcaatttccaaataacgcagcagtcctgtcattgctgtctggcgcttgcaatgacagaactactgcagaagttcttacttcctctttggcaggcggattttccggttgtcagtttcccatttgtccacataattgttcagagcttcagagataacgtccttcaataaggcaccttccacaagagaaatgtacttcaccttttgaagtaaatccggatctacgatgaaggtggctcgaatttcctggggcttcttggcacttttggctgtttcgcctttcttggggcgacccacattttccctgcgtttggcttccagtctggatttcatttttccggtagtttctgtttcattagcgtcttttttagtagatgtctttgaagataccgccttcggactttcctgcttatcggtttgagctgttggttgttctgcttgttcagtagcttgttccttaggctgttcctgcaccgattctgcttgattggcttcacccatgaagccatccatcaataaggataaattcttcttactcatattgcttactttattattttttacttactgattaacttactatactactaataatttttgtgattagtcatataataagatagtttacctattttcttcccgactgattatctcatcggtcagcgtttgataatccgctgcgccgttgcttttcggctcgtactcaaagatagtctgaccagacagcggcatttcggctatggcgatattctcccggatttttgtctgaaataccttctctccatatcgtttttccaccatggaaatcacttccttgttcaacttccggttattgaacctggtgaagaaaacaccgcctaattcaagcattgggtttaccctgcgtttcacttcccggactatatcatccagcatggtcaagcctttcaagggcaaggcttcggcagtgagcggtatgtagagtttgtccgctgccaccagcgcattggtcgtcacgataccaagtgagggagagcagtccatcaggatgtagtcatacttctctttctgttcatcgagacaggatttaaggatgccttcccttgccatcatggtagccatgtctatttcggctcttgccaagtccagtgatgctggaacaaggtccaggttttcacggatgggtacgataggcagcggttggtctttgaccagcgtgtcgtagatacttgtttccgggtcttcgttctgcgtcagcgtgaacgtgaggttctgctgcgcatccaagtcaacgagcagcacccgttttcctctcagagcaaatgctgcgcctatacatgcggtagaagtggttttgccgactccacctttctgattaccgatggctattgttatattttttgctaccattttataggtttactatattattttactactatattattatactacaaatatactatattattattacacaattagtttacctatattttattaaaaatagcacgatatttatatgttgtatatcatgtatttaaatcattttccaaaggaaataaaatataaatatacatacctaacctcaatgcgtaattaaacagattattatgtgctctatatcatataataaatagatatttgcattatatttcaatttaatattatcaactatttctactatttgaaatataaaaactccgacctgcacctcacggcagaagtcggagcggaacatatataaggaatttacgcagtctgtttcgctgcaagtatctgatgggcatgagcattgaccagccggacaatccggtcgtggtgcggagtattcgtattgcaaagtccacggctatgtatcactttcccctcggtcagtgagaactcaatcgtctcgatgcggttccctccttgtcatgagccgatagtatcaagctgtccgccttggcatagtattcgcactgaaagacgcaatgatgcagggcatttccctcggcttggaaggcttccaacgtatcaagtaccgaaatcaccaggtttttgtcggtgatggtaatgccgaagtaacgtgacttctccttgtagaactcggcttccttccgtttggcttgctgcatctgctcccggcttctgcgtttctgctccatttgattgtgtcggttcatccaatagtcatgctcggctctgaggttctgcggacagacatacttagggttgcagatgtccttgccacactgctccagcaagcggatggtgtctgcccacaatcccatgtccgaagggcggtagtgatgccgggtggctaccttatacgactgccagcatcggtcaagttccaaaggtcggtgtacaaaataagacacggcatgtaaatcttttgacttgaggatgaaaagcgggtgcatgggtaccacactgaaatcgtccccattggaatagcagtcgatttgtgcaaagttggcgccgtccttccggatgtgtgcatagaaaggaggcataccgcaaaagcacttgcggagactctctctgtcccactgcagggtgagttcgtaaacactgcccttgtagagcatcttttcttttcggtctttgagtttgtatgccatagctgaactaattttttccctttggtttgaagccttagggcttctcactcccgggtgatttttacgatacttcatctcacgaagggtgtaagggacggaaggcaaatgtggcaaggggaaagcagacggaatacccaatttggcacaaattgtggaaggctgccggctgctttcttcgcagccaagcgcagcgccatttgacgccgtaccgacccttcgtatctttgtatcggaaatttcatcgggagtgcggatgaactgctcatcaataagcctctaggtacagttcataaccagacaattaaacctaaagcactaataaagtatcgtaaacaaaaaaagaatttcattctaacacaattattgaaaaataaagtattaactttgtacttaaataatcaaacatcaaaactttaaagtcaatcttatgataaaacatttatcactgttcaatttgttattactcatattatctgtagttatgagtagttgcgtacaaaatgtaggtaataataaccgtcaaaaatatgcaaatgtccagcaaaaggaatttgataacatgttggccatgaatgtaaaaaaaatactatcatttagggaatgatattcaaaaaaaagaatttaatgatagcgtaaaactttcaataggctcttatatggatagtgtaaagctatttaataattgggagggtacgattgaaaaaataagaatggatgaaacagggcaaaaatcaatccacttaagttttgaaataaaatataaacctgaagaatacagagaaatttgttttgaagtcgattatgtactgccaaaagatagtactaattcagataaaatatatcagactgttagaaatctcgacgagttttcagaagtaaaatttgatggatttattagaactaagtcgaacggagaagcatattatggaaactattcagacgacttaattcatagttatccagattttaatttttttcttattgatataaatttaaagtcaagcaatgattcaatatctgataatttaagaaatgccatcaacgttagttttgagtcaattgaacccctcaaacttaattttagagggcaaatttcccaaaaggaatcagataaaagaatgaagcaattactaccaaagtttcaagctgcaaaagaaaccctaaccaaggaagagcgaacatatatagatagattatgtcaagccctcacattaaactttatatatggaaagtaatttctcattataacagcttatcgaaagccatatatagataataaatttttaaagaatcacacaagcccccactaagggggcttttttttgtttctactaaacacggtaaaaagtaagcattcgaagaaatgcaccttttacactttgaggtttggttgtagctttgcggcagtgaatacaatcaaacctcaattattatgaacagacaagaatttgaagaattagaattgcaggtgcaacaaagcgagctgccgttgaagtcgtaccttcaacagataggtgtaagttattcaacctatcactactggcgtagaaaatgttccgttgacaggagcagtatcaaacacgagttggctcctatcagttttaaacaggcatttacggagtcttcccaagaagaacaattgccgcatggtgttgcgctgctgtttcccaatggacttcgtgcccacttcgggagcggttctgaagatttgctgaaggaaatatttacccaaagtcttcgagacggtcatgtttaacctgaacgacacgatgcgctacttcctgtgtcctggcaggacagatatgcgcaagggtatcagttcgctatgcggagtggtacatgagaaaatgaacagtgaagtgaggaacggtgatgtcttcatcttcatcggttccagccgcagactaatgaaactccttcatgccgaagacggaggtatggtaatgtatgtaaaacgtttggaggccggtcgcttcaagctgccggagtatgatcccaaatcaaacagctatcccatggagtggcgcgatctggtgatgatggttgaaggaatacaggaaaacccggaacagaggctccggcggttaagagccgaacgtaaggaataccatgtataacatgttttttgcgtgagtaaactttggatattgttgcataattcactgttaattagtatatttacatcattaaaagaagtatagacaatggaagaaaaagaaattttactcaagacgatagaagggctgaatgcctctatagcctcattgtctactactaataagaatcaatccgaacagataaaaaatctgcaggaacgtatcaaggagttgacggctcaggtcgcatggctgaaccgtcagctctttggtcgtaaatcagagaaacttcgcgtatatgatcctaatatgccagacctctttgccgacgagttttccggactccggcagcaggcggaagaaaagcgggacgaggctgtggaaaagattgagaaggaatcggtggaagacgtaaaacgaaatcgtcagaaccgcaaaatgatagaggacttgcccgtattggaaaccgatacaatagaaccgaaaggcgtagacttgtctttataccgtagaataggcgaagagataacaaaagtcgtcaaacacaagccgggaatgctttacgtcaaggtgatcatccgtcccaaatatgctctcaaggatagtaccctgcttcctccagccggacagaaaggcgtagagatagctcccatgccgctgatgccggtcgacaagtgcattgctgacaccagcctgcttaccgagatactgcttcagaagtatgaatatcatgtcccgttctaccgtcagatacagcaataccgccatcttggaatgaaaggccttaccgaaagtacactggacggctggttcaagaaaaccgtggaactgcttaagcctctgtatgaagaactcaaatgggaagtcttctcctgtgactatgtacaggcggatgaaactacagttccggtcattaacagagaaaaacacagagccgacaaggaatatctctggatggtaagatcagtcatggagaaactggtcatcttccattacgacgggggatcacgggccggagcggtcatcgaatccctggcaaatcaatataacttcaagggatatcttcaatgtgacggttttgcaggttatgaaacagccttcaagaccaaccccgacgtgcggctactcaactgcctggtgcatatacgccgtcattttgagcaggctttggatgaaaacagggagatggcgcaacatgcactgactcagatacagcatgtctataaaatagaacgccagtgtgacgaagccggcctgtcatatgatgagcgcagacagacgcgtcaggaactgtccaggccaatcatggaggcaatgaaggtatggatggagacagaaggaattaaatacagtccaagttctttgacaggcaaggccataacatatgcctataccaaatgggataatattatgagatgtctggacgatggccgcctgtactgggacaacaatctggcggaaaatgtccaacggcccatcactctgagcagaaaaaattttcttttctgtggtaatcacgaagctgcggttaatatgtctgtcatatgttctctgctggccacatgtaaggcgcacggggtaaatcccagggtatacctgaacgatgttatcgcacaaatgccttatcacaaaaaggcaacccaagaagaacttttgaatctacttccacataaatggaagttgaaacatccggaatgtgtactgacaaggcaaaaggaggaatcttgtaactgatataaattgtaacatatgggttcaacaaaacaatagcggctgatactattaggttcatagtgacagtcgctattgttgtatataaaggtttaatacctgtagttggccgaatacttacggtaaaaaagtctcagctaacataaactgaaactttctaagagttgtaaaagatattctaagttacttcttcgaagccgccaacgacagtttcctgaactgcttcagcaatggttccatttcaagtgaaacacagcgggcacgttgaccggctgccttgtttcctttgtctgcttgaagggttgcatccttttggaatgcctccatcttcatttggagttgtacgagtaattcattcataatctttacatttagaggttacattacctaatagatacttatcacgggtctgaacttatgcgcctggtccttcggagtttcttgaatggtacctgactgcatcgagaagagccaggccttgctgtccctttgtccctccacttcggtggaagtccacagccagcagtcaccgggctgtaaactgatgggtaatccgccgaccgcctctatccgttggttgactagtctaatttgctgatagaggtaagtgagttgctttaccgaagggatgtaggcggactggccgtagcgccacatgtcgaagacataaacggctaagggagacttcacttcttcgttgcggtacatggcatgggtgttttcgttgtcgtcttccttctctagtgaagccgaggtttcctgttcgccccccaggctgtcagcaaaggctttaggtgcgacatcccggatggaaacggcatagcccaaagctttgatctccggattccggtttacataatagacaatggccaccggctctttcttggaggaaccgaacttttctttagacagcacactgccatccgagcagactacgtcaccaacctggagggaagaaacaatggatttgtctccttcatgctcacaatcttcgcaggaagtaatgaataaagcacttcctgccaataacgataagaacaagtttctcagtttcatagcagcggtatttcaaatgatttgactacaatttccgcctccttatcgaggatgaaccagtattccgagtggtaaggctttccttttaaggtcttggcttcaaaatctatcttgaccttccatccgttaaacggctttgcaaccttttctttcccggctttcgcttcttccatttctccataagctatcaaagcccggagggtggtcatggcatccagctgacgggtgacttgatcactcattgcggcatcgtccttgtcgaggttctggaaatagtctgtttcttccatcaacttgtggccgtactgcatcaggtgcatggaaagtgcagccttctcgtgtggattgacatattccttgccaaataccgaatctgccttactgatgctcttgatttggatggactccggattatcgacggttgctctcaaagctctctctgcgatttccaccgcccgtttctcgggatggtcggaacagctggcgaagtaaaacaggccgctccagaagcagacggcgatcaccagcaggattgtgagtttcattcccggtttcatatcttcacaatttggagtttatcgggagaaagaccgagacgcttgcggtagatggtgccgtcgtcgcggtacatctccagttcgttggaggtgatttctttttcacagatttccttagcttccgttaggctcagctggtggccaccgatgttgcgccagatggcgaagttgcacggcgcctgctggttgctgtaattggagcagttgaaggctctcgtacctacgcgaatatcgccgccacaatgcggacatttgccaatgatggactgcatgttgatggcgccgttgtcggccagttccagcacggaaggaaatgcctttccttccttggaagcgaagccgtccaacaggatgaggcggtgctccaacagttcggcgatttcctcgtcactcatcttgcggttgccgataatgcagttgatattcagcacacaggtaggctgttcggcgatattgttctcacagcggtagcccttgcaggtctttaccacgttgccgccacacaaaggacagcgaccgattatattcttttccatacgcttttgtttttggatgatttgtttactttattattctgttacttgttgctatgattactttcttatttctttacttgattactttatgattagtaagttagtttaccattttcgataaccctggttccagtcggagatgataccgccgatgatgttcttgccggacatcacgttggcccatccttcgggatcgagcgagaaccagaggtcattccatgagagtgtgcgtacttgccaggccagaataaacaggttggtgttgatggcttccagccggcttaccacctcgttggcgatgtagtagcgttccgaagcgtttagcagattcaccttgtgcttttcgttctttccgtcatctcctgtcacgtcatacctgcccgaagtcaccaactgcttcataaagggaaagagcaccgtcatctgggtggcggcatcagtcagctcatccgatgccatggccgcaatgacggttcctttcagattgccgcctaccgatttgaggagcaggctgcagttctgcgggatttccttggccaccagttccccggcacgcttaatctggtagaggttttgcatggcaccctgcgcattcgagaggtagtccagcatcttgtcttccacatagtgaatccgctccagtgaagcggtaacggccacttccactgcaatgattttctcctgcgtcttcttgcggtccttgtggatcttcttcaaggctgcggtctgacccaatacggcagaagttagcgccgggtcggtctgttgggcaaagagcggagttttacctatcaataagccaacagcagctattaacaaggagcgtttccatcgtcttccattcatacgtttataatttagggcctgcatttctgcgttcggccaggttattgatttggtcctgtttggtcggatgcaaccgtacctccatcggtttgttgagcagacagtcgttccagtccttgaaagccttgggtggaagccattgccccatatcgtatctgaccgacaagtgttccttgacctgcacctgaaagggtcgctccggatcaagccggaaggaacgtccgttcgcttccacttccaagttgtcacgggttcggttgattttcaaggggatgttctctaccagtgccatcatgcgcaagccgtagatgcgaccgggcaggtcattgtcgaaacagtcaaacgggcgggctccgggaaagcggttcagcacctgccggatttgtccgtcagagaacgtaccgcccagtgataccaaggcaatttcattggtcagctgcttccggttccattggtagaatgccatggcatcgaaagccgactcacagaagaagacactcttcaccacattcggatagccgccggaaaggtcgaccacccatgcagaagaggaagaatcacttccggctgccttggatttgtaaccgccgtacccccgcagttcgtagccccgaacctggtcgttctctccgttggtataagggaagccgatgttgaagccgtcaaagtgctcgttcttcttgtcgcggatgagccggatgaacggagcgaaggtgcgtaccgtttcatcggacaatcccctttgatggaagatggccggaatcttatcggaatttatcggcttcacctcatacctggagctgtcgaaggttgcatgatacctgactgactgcacatactcctggtcttcgcggtattcgggttcgggcatgttggcaaagcgggaaagcaccttggctatcttctgccattcatccttgcccgacacgttgaaggcattcaggttctcccggatgagtgtgaccacatcccccttggaaccgtcgcggcggaagaaccgctgggaagccttgtcctggggatgacagacaataagcgtgtcccgtttttccctgccgtcacccaacaccagctctatgtagcgacccacaccggccttacggtcgagccgataacccagcgtataggctacatcatcaatgcccaccttggatttgaggtccttgaagttcactttgtaatcagtcatggttcatggatttgaaagtatgattagaaactcattttcgctcccacggcctgcgtgcgtttgagattggctatatccggctcgaaggtcttgtgcgccgtcatgttcaggaaggcagccttgtccttgtagtccgtcagctggaaataggtcttcgccgtatctttcgataccttcttcaaacccagttccacaccgtcgtaggaggcacggatggcataatccccgttacgtgtctttacgatggccgtattcttgaacggcacctcttcgccttcacctaacggggcaaacgggtcgttctttgtcaggtagggctgctcgttcagcgccagccgctgcttgtccacatggtccagaatcaggtccgaagccttgttcacgtccgccatgacggaaacgatgaacttcggttcctgcttcagcaccccaatccaggaatccagataggctgcggagttgtccgtcaccttcatgtcaaatcccatcgaatggctgatcatggcagcagtcagctcggctaccaattcttctttggcgtatttcgggtctccgaaacgtccgcccatctcgcggttgagccgttcgggggtcatggtggagtgcgtcatctcgtgcagcatggtggaatagaactccatgccgccccggtagatttcctcgggggtattgccgatgttgaactgctccttcatgggcagcaccacgatgtcgcgggccggagaatagtaggcaccgtcctcacgcttgtctgcctgtatgggacagagccagccttgcgtctcaatcatccggtcgagggcagcatgggcatacatgccttccttatcccgaagctcgggcaccttgaacttctccatgagtttctgcacccgttcgggctgcacctctgccaggttggtctggtcgatgttatatacggggaaagccttgaaaaagggaatgacatccatgcctttcttctcctccttgctcatggccttatactcatccgaactgaccttatggccgttcttgtccttgaccagcacatcccaatagaccaccggaaaggccctttcacctttcagtacatgggctttcaggttgtgcgcctgcttgaaggtgaggtacaccggtagccggtagccctgggctgcggtctgcagctggaggaaaaaggaattggaacccgagtagttgcggcctcccacattctgcgggagacctgcaaatccagatgcaccgccaatccagcctttcttccagtcggaagccttcatctgctccatgcgggcaatcatcatttcggcaaagcggtcgatggctacctgcccggcattgcctgatgtgttagttccatacgccatagctttcgtcatccattacctgacggtccatctggtcgatgtccgtctgttcgacataaaactctgcggattcatccgaaggatccgtgccgtgggtctgacaccactccagatagtcctccgcattttcaccgtccatcacaaagcggaggaaaccgattttacctgcctgaaggagttccaccaactcctcgtgtgtctttttcgctgtcatatcttttcgtcttttattatttcttgaatattcgtttgtttctcttggttgcgttacattttcatggaagccgacttctccagtttgttggtcacggctgaaagcatgcccatgatttccgtattgaggtacttggctgcaatctgttcccgggtggcagtctttgccttgaagagcgagtagccgtcatcgaaggagagttcatgcttgctggtcttgcccttatcgcccaagtccatcgacaccttccatttgttgtcagagtggtccttggccacacggactcctttggggtccactccctcgggaagctgatacttcttgtaggctgactgcagatgcaggcgctccccgaagttcttttccacgagttgtgtgggactgaccacgcggtcgaagtaggcattcaggtcctcacgggaagccactgccgacatcttggtgtcgcccatctgcacatagaacttatacttgccgtagtcgggtcgctgttcgtccttctccttatagacattgaacttgtcgatagtgatggctccgtccggaccggagagttccttgggcatacggaaggcttcttcagacaccttcggcatgagcttggtgggataatagcgttccatcagttgcggcaccgtcagttccttcttctggtaagcggccaaatccgctgcgtccattttctgcggcttcagctgcacgccgtcaatcttggcggtaaagtaccagtccgccggattggtggtgctctggaaggcatggccgtggctgactttctcgccgttggcggtaatcatctgcggctcgcgtggcttgcgttcctgcttggcttccgctttctgctcggcctgttgttcactcttgacttcggctttgacttccgtcttcatttccttggcaggtttttcctctgcagccgtcttgactgtcttggtaggctcttcctgcaaagcctgttctttcttctttttcgccatagtgttcttgttagaggtgttcgtttcttgtactttttccttactggattttttcttttcggcttcttccttctgctgcaccagcgatttcagtgaatcgcagatagctacccgttctccggaacgtaccagcttggggagatgcttgtccaattcatgatgggggaaaatcaggagtttgatggggtctttctccagcggaagaatcttatctgataccttcagcgccagtatcaccgatgccttgagcgcatcctccttgtacatttcgtagaagttcccgttacggaagagcaacatcgcatcaggatgcgtcttcttcatttcgttgaacatccgtactagacctacattctgttcggcatttttcttcttgaccataagggtaatgatttagagtttgagtccttgggaatgtttttccttctgattgccaagtttcaaagccctttcctgcgactgcttgtccaccacctgctggtattcccagcggttcttgtccgtcatcaccagtcccaggaactcggaatgctgttcgtcgtagcagagtttctgctgtcgctcccactccttcaaatccccttggatgaccttgaaaccctgaagctctttcaggtcaacaccaaccgaaaccttctcgccgcctacattcagttcaatgggttttccctcgcgtacctgctgcttctgctgcatgcccagttcgatgtcattgactttctccatgtctttgagtttctgttccagctggacatccgtaactcggcgatgaatgacggatttggtttctggatcgagttgcagatactgttgggtcttctcgccgttgacttctacggccttctggattacctcacccttattgagcctttcagcttcctgctccgacaaacgcaataccggacttcgttccttttcaaacacggcccgtaccgggtaagccatgagtgccgggttgccgtatctatccgataccagctggagtttgaggggaagcgtgataaggtctccgttacgggcactgatggacacctgcaagagcggtgtgacctctccgaaagccagtttctccttcacctcctgagggaggctgtcggccttttcccggtcaaagcccaagaccgccagtttctcataaggcagtctttcagaatgattgatgttgtgcattttcgtattgtttaagtaaaacgatatatttgcggtcggaaccgccttgaacacccgcaaaagtattgtcaaccctatcattgaaaagaaatgcacaacatcattctgaccaccgtgctgctgattcttggtttcgcttcagcatcggcacagttctatacgattacaaaagagaaggaaatccgtcctgaaaagcaacaaaaagtggcttctgacaccttacagaggggattagtggcttttgaaccttacaaaaaggtagaaaaaaacttacttggccaagaagaacctgtgaaaccacttccggagctatatgcccgaaaagtttacgcaagggtgtcccacgaaaaaaagtctgataagggaactgaaagaactgaggtttctaagcgaaaagaacttcctgcactcaccattcccaatctctatcaggaaatcatccgcaacggcattcggcatccgaagatagtactggcacaagccatactggaaacggggtggttccgttcgccactctgccgaaaccgacataacctgttcggactgacgaatccccaaaccgggaaatactacgagttcaatcactggacggaaagcgtccgagcctactacaccaaggtacagtacaagtacaagagaggaaactacctgctgtggttacgggatgttggctatgcggaagacccaaggtatattcgtgaggtaatcagagttctaaagcatttgggtaaatcgtagagtggaatacaactagaaaaaaacagagactacttacgattgtagcctctgtgaaaatatatagagtatcggtcggggaatttatgctcccgacctacaatggagattgcaaagtaacacaaaaaaatagactatctggactcttccttgaaaaacttttgggagaacagttgctttacgttgcagttgaaggcataatgcagcatgcttccacacaccttgcatcgcatagaacttaaaaggaattatcaactgattaactttgcattttttgcctaaaagatacattcgtatcacaaggtttgctacctttgcgtctgatttaggaaataagcccagggagcagaaggcgctccgcagtagcatatagatagccttcaacacctgatttgataattaaacgtatgagaaaaatgaataaaacaatgatttatgggatgttgacagccctgtttgcgttagcatcctgcatggggaatggaaatccagtatccttgtctgaccttgaaggggaatggaatgtcgtagaactggcaggtcagtcggtgaatacgaaacaacagcctttcataggttttgacacccgtgagatgagggtgtatggatatggaggctgcaaccgtctgatgggttcgtttgaatggtcggacgagtcagcacggatggtgatggacaaactggcttccacgatgatggcatgtccggatatggagcaggaaaaggcactttcacacgcactttccctgacaaagaaagtaaaacggggagacaccgatcagattctgctgtgtgattcgctcaatcaaccattggccaaattgaacagacgctgcttcatgatgccgctgtctgatttgcagggtatatgggacgtggtgaaagtgaacggcgaagttttgccggattccatggagaaccgccccttcttctcactcgacataacggaaaagacacttagtggaaatgccggatgcaaccagatgaacggtaagttcaagacccttgagaaaccatccaattcattggtgttcctgcctatttccagcacacgtatgacttgcccgaacatcgaaaccgaatttgaggtattagccgctctgaaggaagtaaccactttcggcatgttacccaacggacacgtgggactgtttgctgcaggcagtgtgcaggtgctcgaactggccaaaagaaagaactgattcctatattttccaatgacatagggaagatgacagacaaggctacttttctccggtttcccatatcctggagaaaagggccttgttttaactaagtaccggttgccgataagcaaaaaacttacgattcattgaaaaggtatctcagcatacattccctatttatttttcaatccaagtttaccgcatcatgaaattatatgtagccattcaacgctttttgaacaaaaactgggtgcattatattgtactcttcttcattttgatttccattgtggcagtcattgccagttcttttgaagagatgtcccggtatcggttagccttattcggcatcacctacatttcttcgttcgtattcctgctcgaatatgcagctcgtatcttgtccgcgccagcccttcatccgacgaaaagtgctattaaggcacgtctgcattatacattctctttctacggatttgtggattttgtagccatcctaccttgtgtgctgacctatatctattggaacacagaagtagtgcacatcattatcctcccttatattttcatcatattcaagctgatacggcactcacgttcattccgtttgattgggaaagctctttattccgtcagagaggaacttgttacggcctatacagccagtttcattaccatctgtttctcggccatcctcatgtattacatcgagcggaatgcccaacctgatgtgtttgaaaacatcggtgacggcatttggtgggccatcatcacctttgcaacggtaggttacggtgatatttatcccatcactccattgggcaagttgttgggatgtatcatctgcctggtcggtgtagccatggtagcgatacctactggtatcatcagttcttcctttatgagcatgattcagaacaaagaacggcaacagatgcaggcagagaaagagcaaaaagaaaagcggcaagaagagaagcattccaacgattgactccgttctgtttttgccttgagtttctttctacaaaagttgcctccaactcagtttgctgagtcgcccaactcggcaatctagggtcgggcaacttcactttcgtccaccatcttagtggtatattgcacggggtaccacttcttgggttcatcggggtgcgaagggttgatgcgttgcaccgctttcaaaaaaatgttcataatcttctcttttaaggttagtattttatttgccgtacagccttcagagactgcacggcgcaaggtaagcatttcttttttattttcgtcagatacattcgataaaaaacgcttgtcagctcatcagacgggcaaaaattgccgtgatagaatcaacgactcatccagtccgttatttcaaagcgtaccgtcatcgaatatttcagttggatggtacggaagttatcatatcctccggcattcatcgacatcacgttgctttgtaaagcaccgaacattcctgagtttgcattggtgttttctacgatacgtatcaccgaacccaatttcttatccaaagcttccaccaaataagctgctttgcgttgggctgctttcagagcttcaatcttggccttttggtggtaagtcagtatatccttgttatccaacttgccaatacgcatcgagtgaatgccccgggtgttaagcttttggacaatccggtcaatctgcttgaagtcctgcagggtgatgtccagctgtttcgagatcaaaaaatcatgcccctgatgtcgccaattgttgccatattcttgaacgcgtacagctgagtcggggattccggcatcatggatagcctgcatcaattcctgctcaatccgggtaataggtaccttcgtcttgtattgctcaggcttcgatacgccatcaaattcctcctcaaaatactcctgtatttcaatgagataatgaatctcatccggcacaaccgccatttcagacgttccggtcacttcgatataccgctcacactcctgcgctttcatcgtaacacaaaccagtaggctcatgatgaaaattagtccatactttttcatacgcaaatacttgattttagttcaaactgttatctttttacgaaccgattttagggaatttcaaatggggcagacagacaaacgacgtgctgattatggggagcaaccagtttatttatccgataacgtcccttcggcaaataataaaaatcaccaacgggaatgcgaaagcaatacaagcaatgggcttgttcatcgtttatccactctgtctctgctgtatcgggcaaatgcttcaattgcggctgttcccaatcttgaccattccattgctgaagctcccaatctccgttaaattcaagaggtacatccgtgtaattggccagaaagacattgatgaccttcacatcttgccaatacaccttacgctctgtccaaaactgatgttcctgcttacgataagatttcggcaaatcttttctataccacagataatacgagggcatcttataaacaaccgtatccctgtcttgtatctgtggggcaatggctttattcccctctaccgtcaatgcagtcgtatcctgctctgaacctccgataacggcaatagccgaggccggaaccgcttccggcaaaaatgtcttctgcttatccgtgcaagcaagagacagcaaacagcataacatgccgacaatcgtaactttcataatccgtcctcctctttaaaataggatgaataaaggttttattgagcaaaaatacaaaacattcccttagttgatgctgcccaaagttcatttttgcacaatcttcaaccaataatgagaaatttcgtggataggaaccgatgaatgaactaccctcattccttttcctttctgatagtgcttctcggtgaagagaagctttcctcctgcctgacggtaagtctggatgagttcggcggtcttgacaagctcagcgtccacatattcatatcgctcataatggtagctggctgccgattcgcgggaaaaggagaacagacaccgctcttctttgtcaatccgtagattggcaatttccttcagctgcttgacggggacataggtcttttgtgtcttatcccacaaataaccgtcttcatattgaatgcgttgatttccatagttgcctaacggtatggcaatgtcatcctgtccgtcaaagttcaggtctttaagtgtcacctctgcgtgaaaattgtccgcgagaacaatatcttccggataggtataggtaagactccggatgcttccagatggatgggaatatcggataagcaattctgtgacggctttgtcttcctggatgacggtgtattccagcaattcgttgccgttccggttaatgattttccattcgtccgactgccaggatgtatgttccctctcgttgctctcccctccatgttcggttacataggcatgaccgttcgcaaacggagtggcatacagaaattgggggtggataaccacattgcctgatgaatcggcaaagcctatccgtccttgttcatccatcatccggaatagtccttctttcagataatccggcccgttatcgcatttaaaaacgtaaaatagttctttgcctgcatcattgatacaaacaatacgggatttcttcggtttgttctcatacacaaagcctatttccgtgatagtatccgtctgacaataccgatatttcccgtaaggcacaatggtatcgcctcgttcattcagataacataccggtacccccacttccagatgaggttcagtagtatgggcagtcagcacggcatcatatcgcatcaaaacaggggtatcacaagaactgtagccgattatcaaaacatctgcgtgagggcctttcgccatgttatccagccagaattggatgctgagagtgcttttcccgggacgtaagactgtgggtacattccgtagcgattgaaaaacttgcatcactgactttcggaatgcacggggtacttggttgagtaccgtagcatggctgatatagccttccggggtcacagtatattccacctgtaaaacacaacccttgttccttttttgttgggtaatgggatatttacactctctgctcaatgttttgatgagccaattataatcgcgaacatcattcaatgatttgttttccaacatcagaatggtgtcgttggctgttctttcttgtgcttcaagttgaaagaagcacccaagcagtatgaaggatagaaaaaagcgtttcatgtgtatatggaatttaaatcaaacaatggctcatgacttaggcaaccgaaactgaattggtatggtataaaggactcgttgaggcctcccatcttgttttcccggtgtccacttcggcatttgtcggataattcgcaaggcttctttatccaacaaggggtgaacgctacgtacaatccgaggctgggcgggcgtgccgtctttctcgatgatgaattgcagatgtacccgtccttgaatgcctgcattcttggcttcttcaggatagcgcatttctttctgtatgaaatccatacatcctttcattcctccgggaaattcgggcatgcattctactacttgaaaaaggtgattgtcatccgtcggaacttccggcacagacgttgttatagttccagctgaccggttatcttgggtagagggtacggcaagtctcttttctttctgtccttctgccaattcttgtggattgtctgtcagcttgaattccgccatcaaagtagcctttcttccggtgtctgtaaaagtaacgggataaaagaaacggtatcttcccggcttgttgtgatgtatttccggatacaaagaaccggatagatgccttgttcttcctggctcaatgatataaccgatgtcaagaaaagaaccatgaatgggcaagtcccgccatacccctcgttcatcttcataggtcaagaaataataagcaccggatcgtaatgttactttgctgtgattaaccaaaacaaaagtggcttgtttgctctgagtggaaaagaccggataatcagattgcagcaggatgcccaaagtatcgctaacacccatactattgttgggggctttttcagtgggcccttcaaaaatgaccgccggtgaatcgataatcttttcccggaaagcctttcgagcttccggagtattcataatgaaagtctgataaatatgatggtcacttataccgcaacctgccatattagatttcaagtattcatctgtaagcttttctcgtttactccagatgatatccttaatttctttcagctgtttttgggtaaaactttcatccgtggcaggctctagccggaaagcaccgctttttgcggctgcttccagtgtgtgccgtgctacagtggtatctcctctcacttggaagaccagtgtagaaccatcaaaaaacattccttccaagaatgcaggacagtgcggactgtccaagaaatcaccgattactgttgagtccgtaccatatgctttacttaaagcctctattacttgctgaccggttctttggtcaactggttcttccgttataggttgtttctcagatttggtggaaggaagagaaacagagaccagcttatccttcttttcaggaagtggctcaacagtatacaaaccatcttcatctttgactagctgatgcttgccggtatccaaccattgattccactctttaaataaggattgtataaacagaaataagtcatctgatatattcaggtctttaccacgttgacaggggaaaatcacatgtccgttctttatggatattttctttctagctctatccaaggctttgagataaacaacttgattataggcataatgcggattaaatccgttggcattcattacatctatagcggcataagacatcattcccttggtttccaaaaaggtcgtgtccgtcagcgtctttttaaattttctcgcttccttccataatcgggtagtagcaagtcttgttaaactgtccgagtaagaaggattgatttccttattcagttcctcataaattcccggcagtaaagtgtcacaataagaggttatggcaaaatttccactctcaattctcatatttacagtggggttgcttatcactgaatcattaaacacaaaagcaatttgttttccaatgtttttttctgtttcttccgcccataggttcatataatacggatgtatctgtccaaaaattacgtatttaccaaaggcatctgaatctaaccgtaaaacactgaaatctttcgtcgtaacgataggctccaaagaaagactgtcattggagtcgcccgttacaggataccaaccattttcacggtggattgcaattggcttatgctgacatccgacccatataagtccgatggcaagcatcaacacgactgacggaagtgctgataagactgtacgataaaaagatattcgcgttctcataggctgcataggaatggtttttcggtaaagatacgtattttgacgaaagacggataatggatgggctgattttatttcagataaacgacaatctatccatctatttcatcaagacaggcttatcatcccaggtatacccgataatgattacatctgctttaggggattttttcatgttatccagccagaataggatgctgagagtgctttttccggggcgtaagacagtgggtacattccgtagcgattgaaaaacttgcatcactgactttcggaatgcacggggtacttggttgagtaccgtagcatggctgatatagccttccggggtcacagtatattccacctgtaaaacacaacccttgttccttttttgctgagcaacgggatatttacatttcctgctcaaagtcttgataagccagttataatcatgcagttcgttcagagactgatccaatccgaagatgccgggaggtacttccttacgccattcctggccgaactttttatccaaataccggaaaacttcttcgttgtaagcagtcagcagatggttgggaatactcaaatgacaagccagtttaccatcttccttcaaaggaaaagaactgatatacgtaaccccatattttttccaaaagggatgcttccttataacctcttcttttccaataggaatgatgagcttcagattgggttttcctttgtctatgtattcacgagatagggtcggtgagcaatcatatttttctatatattcataccacagaggaagcgtaagtcgcagcgtatcacattgaaatggtatagtaacaagagtgtcgcatgaatttaagccgacaaattgggcaactaactgatactttcctcttttcaaatgctctattttgaatgtaccggtagaatcagtaagccaaccttgaaacggcttttcatccatagtcaagtatgaagcaatcagtggcctctttgcaacatcgtaaggaagaatttgccgcacttcttcgccatagactttgcctatgagcgtgtattccgtagtatcatttgcttgagtggactttagcttgtcttcccaaatggtaagtacaaaatccttaaattcaatcgtgtactttccgttgataaacaacacctcccaaggataaatgctcttcagtacttctttaaatgcttttgccaaaggatgattcttgtcatcaatgttttcccgttttggacgaacggacataatcactacatccaaatccaccagacaaccatccgaattgcattgcatattatttacccaaaaggtcatgcgtttccctttgtattccggaaagcaatgccaaggaaaacgccggataatttcatcctgagcatgctgtattttcatgccagcccgtagggtattatggtaagtccggcagctttctatacgaccgtgttgaagcaccatcacttgctccgtttctagattgcggtcgaagccgctgtgtacataacgcaccagctcacctttcccggcacgaagttctccgttgaaccagcgggcacagatttttccgtcttgataataaggttgaaacacttctttcaactggtctggctgataagtgagggaatactcttcttttttctgtttatcatagacacagacttccaaatgatgcagatacagatgagattgctgcacttcccaataggcggtatagccttcccaattggcggtagtaatgcaatggttgtccggcaaaaattccatcaaccgatgaaacagaacagaatccctattgatgggcttggccaacaattcccattcttctccctgcagatagatgaaatcaccggacagtccggtagcctttccttcccaaggaataagaaggaaaatgatagctgtcatcagacttttgaaaaatgtaggtatcttcatgtcacgttctaatgttgaggattatacaatacggatgctatagataagctttctgcttgctaaagttattttttctcccttgcaatgctcagtatttcagattacagaatatccatcatctttcccataaacaaaattaaacctgttttattttcatggataactaataagaatggacgattgacatggaatggataaggtgtaatctctggcactattgatgattcaaaaacaacatttgtaatagtcgctgctactgcaactgtgcctgtttccgttacttccaatcgggtaaattgttcgatttcagaaatgtgggcaggtatatctgtcatacgtgaaaaatctgcacaattttcattaaaagcatcatggatgcccattttctggaaggtaggaatgatgtcggatttgtaatccaacttgatagaaggtaatttgaggtccagcatacaacttatactatccgatgcagacagccatgctttccaattggcttcactaaatgtgtctatacaggagtcaatggatacacctttcttgggaagaattactgtcatggcatacgaatcgtttccgtaagggagggtagccatttcaaacaattccgctttatgaaaagcaaaccattgatcagacaggtgcatcatgctgaccggatgcttctttccacccacaggataaaagtattcctgccgggtttcagccggatcaaaagggaaaatccatccacctttgaagaacaacgtattgatgagaatacagttaccttgtgcttgatccaagatgtgaggaatacgcccttgcgtttgttcctttgcccatcggttgataatgcctgttgatttcggttcagaaaaatccagattctgtatttctgcaagaaaatactgctggtttatttgttgaaaggaatccttcacaggtgatttgtcatgaatccagatggaattggctgactgaaagacagtcgtagaatccaatcgaggcagattgcttatcagttttaaaaagtagttattggccaatgaaggcttactcttagaaacggaaagtaccgaagctatttcttctaatgtttttcctgcagcaccattggcaagcatccctaaattgaattgggcactcagaggagaaatgaaaaaactttgtcctttctcctgttcattcatcttctgaaaaaaactgcaagcaaagtcattactgatggataccataggcatctcttcctccgaaagctccaaggaagataactctacaaaaggtttgtgggataaagtctgttggcagctgataaggatgcacaaactaattccggtagcaaatagtaagaagcttttcatatcacgttctaattttaatggttgcacaatactgtatttatcctgaagataatctttcagcctgtcaaagctattctttcttccttacaatgctcaatgtttcagattcgggatgcatgacatacttgccattgtagcaaatcacttcccatggatagatggatttcagggtttcttttagggcaagtatgagagagcgctgtttgttctctgccaataaggtgtccggcttcgtgtagatgttatagacagatacatccaacagcttcccatcagatgtcagtttgaaatctcttacactgaacacgatatgtttatccttgtagttgggaaattggctccacggaaacaggcggctaagttcttcatgtgcctctatcagtcgcatgccttcccgcttatcgttgtgatagacttgagtgcagaacactttcccttcctgaatggtcaggatacattctgtttcaaacatacgaaggtatccgtcgtgaatgtattcgattactttccctttggccatcctgagtgtaccattgaaccaccgggcatggattttgcctttccggtaataggaacggaacacttgtttcagctgcttggcttcgagtctgacatcggcttttgtatcggtctcaaaatcaatgcagtacaatagcagttcacctttctcaatggcccacgtagctgtatagccgctgctgttggccatagaacagcagatgtcatctggcaaagaccggtttagtgtctgggctaaaacaacatccttttcaatgggtttgtccagcagtatccatttctccccttggaagaaaatccattctcccagctgtgcactgctccaagccgataagggtgtcagtagcagggtcgtaaagaatacaaatcgtcgaaatgcagatagcgttttcatcaatggatattttttagggttattgaccggacgtttcttcatcagctgaggtttcagaggttgctgaattgtccgagttttgtgtgatggtaagatggatgggtatttttaatttcttggtctgtttccactctttctcatcattactcaggcggaattcggtcatcatttgtattcttgtgtgggtgtccaatatggtaaggtgataaaggagacgatagcgtcccggcttgttcggatgcacctctggataaagggaagctgtacggatacgatattcgcctggttgaacaaggtaacccacactaaagaaaaaattgtcggtaggcaattctcgccatatgccttgttcgtcctcgtaagtaatgcaatattcttctccacacatgatatttcgattgctctggttgataagcacaaaggatgcttttgaggtttgtgtggaataaaccgggtattccggccttagtgaaatgcctaaagtgtcagaaacacccgtttcagaatgaggcattggtgattcaggtccttcaaaagatactgccggtgaatcgatgatgtgctttctgaaagcttgtctggcagcaggagtattcaatttgaaagacactaaagcggtatgattgcccattccccaaaagtccatgttggatttcagaggtccatcgggtagcctatgaaaccggttgctgatagtgtccaggatgctccttagttctttttgggtaaaggtatgctctgtgtcggcttccagccggaaggcaccgctcccagcggacgcttctagaatgcgtctggctttggcagtgtctcctcgtatctgaaagacgggaagagaatcttcgtaaaacattccttctacgaagtcagggcatcggggactatccaagaaaagccctatggtatccacaccgtaggctctgtttaatgcttcaatcacttgctcacctgcctctttttgagtgatagccggttgttctgctttatcagatagaacggttgaagtcgattggcatcccgtaaacagggcgcataacaaaaacagacacacggaaaatccattgctgttagggtgtgattgaaacggaatatgtcgaaatgctttcatgacttgtatgttttgagattcaacttatgccatagggctaccttcggaatgcttgtcagcaaggataactgactcgctgaaagatgaatgtcggatagaccatttttccatacgtcatttttcgcctgctattcgattctgaattcagccgccatataccacttttgccgagatccggaaaatccgatatccttgatgactctgtaagttccgggacggttgtcattgaccaatggacggagccttgcggtaaaggtacgggtatgccctttctccaagctatatcctatatcagtccacgccccaccattgtgcaaataaatccattgttgcccttctttgcggacaatccaataatcctctccaaagaacagacctttgggattttcgtttgtaagttgaaccgtaatagtttctgttcctacgggatagaccgctttttcggtctgcatggttacttgcagggtgtcagaaaaagaaggcttgtcaaatactacgttctctacaacctttccatgactgaccgctgaatagctgaccacttttcgccgaaacatttcctgataacgaggggtgttgttcatcaagcccacaaatatggtatccccgtcatcatgtactatccaagtagtactgatattatgggcaaccgtgtcgcacggattaacagagttcttgtcccaataatcatcaatcagtttcctcaatcttttcactccttttcggtccaccagttcaaattcggcatacgctacttcgccgccattaaaggtcttataaatccgatagttaccgggacggttgggtatttcagaagtgtacagttcaatagtttgcaaacgagatgggtggtaatcgggatgcagcatccaaagcatatcctcgataataggattggtgggtaaaggttcccatttctgcaggccttcattatagaaagcgagactgtattcatctccgcacgtatacattctatgggaatggttatggataaaaacgttcacctgggtagcagacagcggataataggcaaattccgtagtcatggtcagtgaatccggattcatacgttttccggatggaatatccttcggtatcggctgcaagcccaaaatggttggttcagatactgtgctgtcttcctttttcttcggctccgtctcttcaagtttaaaaagaaccggcactgtatatttcacctttacgggctttcccttccatgttcccggtttccattgcggcaacaagcggataatacgtaaagcctctttatccaaagaaggctccacgctcttcaacacatgtggctgcgtcacattccccttttcatctacgataaactgaacgatgactcttccctcaactcctttctttcgtgcttcttccggatattgaatgctgttttctatctgcttcattaaattccctatgcctccaggatactctggatactggtctggtaggtggtaaatagaatcctttgcggaaatcggagcattccccgctgtctgttgtctggatttgttggcgcatcccaccagcaaaacacagagcatagttatgaatagtattctcatgacattcattttatttcaaattcagcacttaattttatttcttccctgtcattatctacggatgttaatatacgatacctaccgggagctatctcataatgttcaataggaaattggaggcaaagaaagtctgatataggacctattaattcgtcgctatatacaaattctgttactttcattttgggtctaatccacttgttcttttcccatttttccaaagtccaatcatagccgtagcttaatcgaaaatgctgcgggtttaggattacggcaaaaattagtttactgtccggtgtataatgtccttgtatcactttcatttgagtggttgtacccaaattatagaagccggcgagtaccgattctgaactacaaattacagttgtgtcagcatcagccgtatttttattatcctctgctgttttctctgtgcatcctatcagtaggatactgagactaaatagataaaaagcaattgatctcatagtatactttgttttagttcaattaattaaccggtaattcaaatttgactggaaatgcatatctcactttgaggttcactccatgctgacgacccggcttccacttgggcataatcgaaacaatgcgaaatgcttcttcgcataatgcagcatccgcacttaaaacagggttgacactgcgaagaattcgaggctgggtcaccgttccatctttatcaatcaccacctgcatgattaccctaccttccagtttgcttcgcttggcagcctcaggatattgtatattctgtctgataaattccaacaatttgggcataccgcccgggaattcgggcatatgctgcacaacatcaaacacatcttcttcgtctgggagaaactcattaccggaatcattggcaggtcctataggaataggtctttctttggttgaaatctgctgtgaagtataggcttcaaaccattgataaatgttataaaagtaagtttcgttttcatcataaactctaattttcaagaggtaatcacccggttgagcattcttcggtaaatcaatcccgatctcggcttccttccctctttccacctgaagggtcacagactctttgtctatgtttttaccgtatatttcatgtaattttccttgcttatcctcccgataaaaaatgtattcacctttatacgtaagacgatggcttgtattgaaaatggacacataaaccttatcgtttgataaggagtttgaaatgattttaacgtcttcacttttgctcttgatttcctgatgcgtccgatcgtccaaatgaaccttggccactccttctgtatcatccactaagaacccccattttactgagggtgatttcttgataactgaatcgaaatttacgggaggaatatactcaatttctacagctccagtatcattcggattacgcttgggaccctcatcaacaagcacaatgagatcctcaatacggaaggttacaggaaaaacgtattttactttcacggtctctccattcagtttccccggcctccagtctggcatcattcttataatgcggagggcttcctggtctaacaggggatggacgctgtatgctactttaggctgtacaacttttccatttcggtcaattacactctctatccaaacttttccttctatttttttgtatacggcagttggaggatactgaatgtgagtctgtatgtattttacaacttcatccataccgcccggatattcaggccgttcttttaatatggcatgaatttctttatcggaagtcttcaaattggaatataacaatatggttgaatccaccactacaagagaagtatccattgggatggcagaacattttttcgtctctgttttctgtcgttgctggacgcaaccgattgaaagaaggcaaaagactatcaaaaatacaatacagcttctcataggcaaaacaatatatgaaaacaaagttctttcgaaaacgcacaatatccgcaagaggctttaaatcaactttttctatggtaatttacatattccacgctgattacatcggaggaatcgcgaacagcttctttgatgtctgccaaccggaattcggtcataagtgtgattttctgtctcttatccattagttctacctcatagaaaaatcggtatctgcccggtcggttaggcaagacatttgggttgaggttagctttaaacagaaattgcttaccaggctgaatactataggctatactattgaataccgtatgtatgggaagagttcgccagactccatgctggtcttcataagtaatccagtatgggtctccactctctatctcgtactcgctctgattgaatagtacaaaagtggcggcatgagccgtgtatgggtatgcagagaattcaggatataaatggatgcccaaagtgtcggaagtgtatcgttgattgttgggtgacggttctgtaggtccttccaaacggatagcgggtgaatccatgatcttctcacgaaaaatggctctggcttccggagagtttagacataaatttacgataagatgattcccatatacgccccatccccatatattgccgtctaatcgagtgccctttatttctgaacgcacatatcgttctcgcagttcattctgtatcttttgcaattcttgctttgtaaacacagaatcctttacactctgagtagctactggaagatggcagatcgtatcttgggtatgaacggagattgtttgcgcgccttgtgtaatcgaagctgaatcactctttaccacagactgattgtttccggatggtttaccgctacatcccacaagtaaccataccaagagaagaatcaatgccattcccaaggctaaataaagcatcgccttaaaatgggtagccttatccagttcttctttttccaacgttttccggcggatatcttccagattttccaccgtcatctgagagaggtcagtctcttttcctgtatccaataaccggtggtaggtgtctgttagcctctcccgattccgtttgcgcaactctcgattttctttatcgcgttgcaacatgtcattgatgcatcccaaggttcccataagccatattttacaatgattctcaaaggtaacaaatagaattagaaatcagctatccgttcttataaaaaagcactgcttggctaatttcacccatcattcctgtcaaaaatctgctttgaaacatctttttgacgaaaaaatcaacaaatgattgtattttttcaaatgcaatgcattatttaatgattttatagtacctttgtccacaattttaccaatcatttgttttatgaggaaatttcatcttttactattgctcatggccgtttcttgttctatttttgcgcaagacaggctatccttgttcatcagcagagcaaacaaatatgcctctgtggaactgtccgactaccggaagcgattgtgcgtagaatataacacgcgcggtagtcttctggatgactattacaggcaatgtggacgcgactggggtaatgtcggtttagctcttgaaatagcaaggacttccggcaaacacatgcgtgacatctgcaattactataaacgctatcggaaatggaatcgtgtcttgattgaaattggtatcagaccgggaagccattactacaatcctttttatgacaggattgatttccatagcaaatattggcataagcactattgttcctattgtgaccatcacgacaggtatcaccatcctaaaaaatacaagaaatacaagcgtcataaatgggacgatgatgatgacgatgacgacgactgggatgatgacgatgactaattttacacaaaatacataccaaaatgaaaaagattttatttttagcagtttgttttttgatgcttgttggcaacacttatgcacaaaagggaaaacaagcaatcgggttcggtttaagttatggaacagaaattgaaagcgttggtttgggactgaaatatcagtacaatatcaccaaccccatacgtttggaaccatcattaaattatttctttgagaatgacaacgtcagcatgttagacgtaaacctgaattttcactatttgtttcccgtagcaagcaaagtgaaactttacccattgcttggtctgacattttccaattggatgtttgactgggatgatgacttagatgtggacatacatgggaatcacgtccatatagatggcgatgacgacagcgacaatgaatgccggtttggcatgaatattggtggtggagttgatttcgcaatagccagaaactggatgatgaactttgagttccgttatcaattagtcagtgattttgatcaagctgtattcaatcttggatttgcttatcgtttttaaattagccgtacttgtataatcaagaaagagaaggtgtgtcgtaatgcacgatgcaccttctttcttgtttatcaccgatataaatcggtttattttcttcaagctgcgataattcgaagatttctttgatttatgtgtctccagcatctaaataaagcgacagtaagctcataaaaccatcctatcagccagttcataccttcttttgtcagttttgcacacatcttttttatattgaaggcaatggctaggaaggcaaagtccatgaagaccttgtcctttccaaaatgtcggaaacgtttgtagttcatattgtttttaatttgtccgaacacggcttccggttctatgcatctctgccctctgtgtttcagtcctttctctgagcagagcagttctttggctctccgcttgtattgtctaagcctatgattcagttctatcgtcctgtttccttttgctttaaaacagcggcatcgcaggggacagccttcacacctgacagctctgtaccgtgcattttcgctgacatatccggatgcggttttcacattcctggtgcctatcctccgcatcctttgccccataggacagatgcagaagtcatgttcttcattgtagtagaagttttcggccttgaacgggtccggtttgaatctcggccgctgctccatgtggaaatagttgtactttacgtaggcttccatgccgttttcggacatgaagcggtaattctcttcggagccatagccggaatcagcaaccaccgtatgggccatccggtcatacctgtttgaaaaagattgcaggaaaggaatcagggtcagtgtatccgtagggttcgggaagagtgcaaaatcggtgatgaactgattttcggtgccgatttgaaggttgtaaccgggcttcgtctgtccgttgcgcatggcatcctccttcattctcataaaagtagcgtccttgtccgtcttggaataggaattcctctcttgcagtgtttccagatggcagtcgtattcctgcagtttgtccctgtgttcttccagttccttcagctgtttgcgtttctttttcagttcagtcttttcctctttcgcggatggctcggaaacctgttccaatgcatgacgcaattctcctgccatttcagtcagcatggccggagtgaactcaacctcctcattgttctctgatgacttctcccgggcaatgacatcgtctatctgccctaacaggacatgtatcttcttcatcaggcgttcacggttccgctcaaccgtttttcgccagacgaaagtgtacttgttggctttggattcgatctttgtcccgtcaatgtattccacattcaggctgatgaagcctttggaagagagaagaagtacggtttgcgtaaacacctcgttgatttccttcttcacccggttgcggaaacggttgatggtaatgaaatccggtttctcatatccggccagccagatataatggatgtcacggtgaagaagcttttcaattttccggcaggagtagatgttgttcatataggcatacagaatgaccttgagcatcatcttggggtggtaagggctgcggccgcattccttatacagctttctgaaactttcaagattcaagccctcaaccagggcgtcaaccatgcgcaccggatcgttttctgcaatatcctcatcaattctttgaggaaaaagaacggtttggttgggaatgtaaggacgaaaatgtatctttgtcatagtgaaattcttatgcctaaagatacagaatctttaggtaataacaaagccccagcttgtgaaagtcggggctttgtacgtaaaataatgaaggtgtgcattttgacacaccttctctcttcttttattggaattattacatgaatcttattgttttagtgtaccgtcttctttaatttcaacttgaacgtcaggttttccatccatttccaattccacaatataataggtacctgtaggagtcaccaccttttctgcttcttcatcatccagttcatagccggcatgttcttttacggtattttgagcagtagtctttactacatcaggcaaagacttatacaacacatcctgcgaagtagagacccacgcataggatgctgtaacgtcaaagcaaacctccaacttggcagactgcaaaaggacatctacttccagtagtttggaaacaggatccacttcaacctccaacaatttataaccgacatacttttcattcagtaaccgagctacagcatcaggaagtttagaaggtaaatagttgaacgaatcatcgtctttatcagccacttccttcaacagatttccattgacatcaaaaaagagatccaattcctccttgcctttttcgatttcaatcacatatactttctccatgcccttacgctcaagcatatccacatcgtcacgcttccaaccctcatattgagtaagtgcttcaaacctttgttttaccgatgcaggaagatcatcataaacaatgtccgtttctgtcatcagccagactccatttgcatcaaaccaggcttctttttctgtattgtcttgattgaaagatgcaacatgattagtcccccgcgtagaccagttatgggctacgttgccaaattcattgataaaggctttctccagttgttctgaaacaggagcatcctcatcgtcatcatcacaactttgcattgcgaagctgaacaggcccaaggccaacattataaaatacattttcaatttcataatcgttcaattttaaatgtaactaatacgttcattctatttttaaatactcaattctatcaggcttgtttgtcggcaaacactttccacactccggcacttaatgcagcaccgatgaaaggtccgatgatgaatatccacagctgacttaaagcttccccaccttggaaaatagcaggagctatactacgggccggattaaccgaagttcccgtatagcgaatgcaggcgagatgaaccagcaccaaagaaagaccgatagcaagtcctgcaaagttgcctgctcctttctttgcatctgttgtacccaatactaccaatacaaaaacaaaggtaaagactatttccgccagtaaagctccgattacggaaactccttcctgacaagcattggctcctgtaccgaccagtccggaattggatgtcagcacccacaaaatagctgaaccgataaaggcaccgattacttgaaacagcatatacataccggcatcctttccactgatacgtcccgacaacaaacaacccagtgtaatagccggattgatatgacagccggaaataccgccaatagcgtaagccatagccacaacagacagtccgaaggcaagagccgtaccaacaacagtagaagctaaatcagggttagctgacgtacacgacaaactgaccgctgtgccacatcccataagaacgagaaccatcgttcccaacatttcagcaatgtactttttcatgttttcttaatattttgattaaactatactattatactacaaggtttaaaaacaggctgtttaacctatgtaacttgcaaatgtataaataaaaataaaggttcaaacttttttcttgggaaatatggtcatagcttataaaaaaggagacagacattctgaaattcatctgattccatgtcctacagcatatctttatggcaaagaaagcttatgaacataatcagcaaagccatgctacaccacacatatctgtatcttttggaaaaggccgcactcacacaagctacagccaaggctacatgcaccatctttgaatatatatccgctttggtggtgcatgccaacatagcggtgatagctaccatcagcaacaacacattcaaaataaaccgaatcaatctctgtatacacatatttatcgtctttattactatagtgtggaaatcgtctttcttccttgccaattatccccaacaaagatatcaatagaggcagaaacgtcaaagaaaaccacccggataaaatatacaacacgaaatcatagaatcattgtaccgactcaacataacctatgtaatactttccttcggatcactttattattaaatatgcaaaattgactcagaacacagtttatgcttaatatttgttaattagaagacctgccgataataacggattataattgatgctaatattgcaaccctaaacttttaacaactcattcttatgaagaaatttattgcagtaaccgtagcttgccttacttgtagtggcatctatgctcaaagagcttatgaaggagccaacttgggagataactggtctattggcatccatgccggtgttaccactccattgacccacagtgcatttttcccgaacatgcgagccacatggggacttggaataggcaaacagctcacaccctttttcggtatgggtgtggaagccatgaccagcatcaatacgactgccagtaaaacggcatttgacaacaccaatgtaagtttattgacttccgtcaatctgagcaacctatttgcaggatattggggaacaccccgattattcgaaatagaaaccgtagccggactcggttggctacattatgcccaaaacggtgacggagaccgtaacagcatctccagcaaactgggactcaacttcaatttcaatttaggtgaagccaaagcttggaccattggtatcaaaccagccttggtatatgacctgaacgcatgtggtgaacgaaacgtaggatttaacgccaaccgggcagcctgggaaattacagccggtctgaaataccacttccgttgcagcaatggcaaacaccatatctcttttgccaaactgtatgaccaggcagaagtggatgcgctgaacgagcaggtaaataacctgagacaaaccaacgtagatcaagaagccgaactgactgctgccaaccaacgaaatgctgaattggaacaacagttagccgactgcaagaatcagggtccggttatcgtaacagataccatcaccagccacaagaaaacattggaatctgtggtaaccttccgccaaggaggtgtcagtgtagtagcttctcagacccctaatgtggaacgtattgcgacttacttgaaaaatcatgaaaaggctactgtatccatcaaaggatatgcttctccggaaggaaaggccgaagtaaatgcccgtatcgctcaacaacgtgcggatgccgtcaagagtttgttagtgaaacggtataaaatagccgagaaccggattacagccgaaggacaaggtgtaggaaacatgtttgaagaaccagattggaatcgggtaagcatctgcaccatccatgaaaactaatccgcttggaagctacattgtgtgtgaaagttcggacataccaagtgtccgacttctttttgattgaaacttaaaatgaacataatcatgaaaaaaagtattttaactgtcttgtttgcgttatgcagcaccattggattcgcacaagtctcctttcaggtaaaagccggtctgaatctgagcagctatatcggtgaaaattccgaccattccaaattcaagcccggagcacgcatcggagtaggtatggaataccagtttacagaccttatttctctgcagccttctctcttcttctcacaaaaaggggccaaatactctagcggctatgaaggaaccgtcgttgatgccgatgcagacgtaaagatcaaccaactctatttggaacttcctatcaatgtacaattccgctttaaccttgcagacaacaccaatctggtcattgcgaccggtccttaccttgcttgcggtgtaggtggtaagactaaatttgacggaggagcttctattggcggcattgcagtcaatggaggagacaaagtcgatacttttggcagcgacggccttgactacaatcgttttgatgccggatggaacatcgggttaggggtagaattcggcaagattttggtcggtctcgatacccagctcggtttctgcaaagtgatggacggaaacgctccacataatgccaatatcggtattactttgggatataaattctaagctactttaaataactctgttcgtgagagtctgccgctgagaaacggcaggctctctttttcgttatatccttgtacaaaagactatatgctttacttctttcgataacaatttactggattcaacacccagtcaaaacaatccggcaaccatacaaaatatagccaaaatcataaaattcaatcataaacattcgtgttacagaatatttttgtactttcgaatttatcatgtgtaacccttttctaagaatgatgataaccatggaatttttcaactgttttttaatcgctatgagctttctgtccttattggtttttgtagcactctattttgtcaaagcaggctacggcgtcttccgtacgagatcatggggtatatccattcccaataaaacagcctgggttctcatggaagcccctgtttttttcgttctgttttacttgtggattacaagtgaaaatccattttccattcctgttctcatttttttcctactctttgaactacattatttccaacgttccttcatctttccgtttctaatgaaaggcaagagtcggatgccattgaccattgtaggaatgggagttgtatttaatgtactgaacggcattatgcaagccttaggcctgttctatttacccgttacagatacggtttattcaggtgggtggcattattttgtctcaccacatgccattcttggaatgctactctttttcttaggaatgggcatcaatcttcattcagattatgtgatacgacatttacggcaaccgggggacactcgtcattatttgcctaccagaggaatgttcaaatatgtcacttcagccaattatttgggagaactcatagaatggattggtttcgcgttgctgacaatttctccagcagcaggcgtatttgtatggtggacttttgccaatctggtacccagagctcatgccatccatcaacactaccgcaaggaatttggcacggtagctgtaggaaagcgaaagagaatcattccgtttatctactgaatatccatctaatgaaattcttcaaaacacataaaaacttgccatcatgactacatccaaattgtttacaccaatcactattgggccgctgacgctgcgcaaccgcaccattcgctccgctgcgtatgaaagcatgtgtccgggacatcgaccttcagaaatgttgcttcaataccatcgttcggtagcggcgggaggagtaggtatgacgaccgtggcctatgcagcagtaacccaaagcggcttgtcgttcgaccgccagctttggatgcgtcctgaaatcatccccgacttgcgccgactgactgatgccattcatgccgaaggagcagctgccggcatacaactgggacactgcggcaacatgtcgcacaaaaacatctgtggctgcctgcccgtaggagcttccggtggtttcaacctatattcccccacgtttgtccgcgccctgcgaacctcagaactgccccaactggcacaagcctacggacatgccgtaaatttagcccgggaagccggcttcgactcagtggaaattcatgccggacacggctacttgattagccaattcctgtcaccggctaccaatcatcgcaaagacgagttcggaggttccttggaaaaccggatgcgcttcatggacatggtaatgaatgaagtcatgaaagccgcaggaaacgatttagccgtattcgtaaaaatgaatatgcgtgatggtttcaaggggggaatggaactggaagaaagtcttcaagtagccaaacgtctggaaggatcaggagcccatgccttggtcttgagcggtggatttgtcagtcgggcacccatgtatgtaatgcgtggtgaaatgcccatccgaagcatgagccattacatgaaatgctggtggctcaaatatggcgtccgactggttggcaaatggatgattccagctgtgcctttccaagaagcctactttctggaagatgcactgaaattccggaaagccctccatatgcctttggtttacgtcggcggtttagtgtcgcggcaaaaaatcgatggagtactgaatgatggcttcgaggcagtgcagatggctcgtgctctcttgaacgaacccgattttgtaaaccgtatgcgaaaagaggaagatgctcgctcagcatgcaagcacagcaactactgcattgcccggatgtactccattgatatggcctgtcaccagcacctgtctgaaaaacttcctccttgcctgcagagggaaattgaaagaatcgaagcccaatcagaaaaaagacaaatcgaataacacaaggaataaaagatgaagaattgtattcagccgaaaagtcatcagaaaggccacggaaaattggcagtgattacgggagctgacggaggaatgggcatggaaatcactcggtatgtagctctggccggttttcgggtgataatgatatgtcaccaccggaacgaagcggaaaaagcacgccaaatcttaatagaagagacaggtaacactgccattgaagtattggaagccgatttttcctcgcttaaatcggtggctcaagctgccgaacaactgttaacacgacaggaatgtatcactctgctgatgaacaatgcaggtacactggaaacaggacgtcatctgactgaggacggactggaacgaactgttagtgtaaactatgtcgctccttatctactaacgcggaaattgcttccctgcatggagaaaggaagtcgcattgtcaacatggtatcgtgtacctacgccatcggacacctggactttcccgatttcttcacacaagggaaaaaaggccgattttggcgcattcccgtatatagcaacacaaagttagcactcaccttgtttaccttcgatttggctcatcgcttacaagaacgaggaattcgagtgaatgctgcagatcccggtgtcgtatctaccaatatgattaccatgcatcaatggtttgatccgttgaccgatcttttcttccgtccttttatccgatcaccccgccagggagcagctactgctatccacttgctgctggatgttgaagctggttcttgtacaggtacccttcaagccagttgccatccttgtacgctatctaaccggtacacacagcatagcaaaacaaaggaactttgggattacacagaggcaattgttaaaaaatggttgtaaatcattaggcactattgaaaatgttttataacgaatgtgagagttgaaatacttacaacaaaagtcattaagagtatacaggttcaaaaacagtatagaagaaaatattatggcaaagaaaaaaacatcataagaataatcaaggagttgcctatatggaagtggaaaagggttttggtatgtgggagaattatatgcaatatggctcccaatacgatactgtcaacgactgtcctctcatccccggtgagactaggatggtagaacaactatcttttaagaaactgtccgcagacactagaaaactacttcgcacagcgatggtcgatttggtacttaactactggcagaaagaaagactgattccagaaggaagtactgttaaggagtttagaaatgtagccattaaagaagtttactacatttccgggcaatatgccaaggacagtgatgagttgaaacatatgctgaacgagtgcattattcctaccatcaataaggaactaaggaaagagaaatcaacagtacaaatagagaaatagcaactttagcagttgtatcaagagtaaatgcaccggatagaaagcataaaaaccatacttcgccaccttgccatgaatgaacccgcgtgttccagcataacaagcaatcaccccgcaagccagcaaagcaccgtctatcccatagtgcatcatcagcggaaaggcacagaacagttgcgcctttctaccagagggaaaagaaggattgctgacgttcccgaacaggtagaacaccaccatcatcagaatccctcgccactcatagtccacaccgaaccaagtggcgaaaccagctatagaaaggatgacagccccacaaaggatgtcctccttttttaatgcctcaaaagctgccagtgccatcacacccaatgccagggtaaagagcacattgtgcgtcccgtccgcgccattctgcagataccagggcacttcgctgactactgcaaatccgagcagctgcaggaagtacttcatccggtttcgggtatgccggaagccctctgcaatgaggaaggcaaacaccggaaaagcgatgcgaccgaagcagcgcatgacctcataaagaagtgtaccgtgctccatcaagtagtaggcacagtggtctgccaccatggaaaggacggcgatgaccttcagtgcgctaccacttaatggaggcaaaatgcttgaatgtttatatgctgattgtaaggatgccattatactaatcatttatgccatacccagcagttccttgaccatcttgtccacctcctcgttcacccgtttgaagttgcggttcagcatgatttccttctcgcggtcgttcttgaactcatagattttcggaagcggtacatagtggtcctcttcgtccttaatcttcttcatgtcgaagtgcgtcttgcagaagtacttcgtggttttgaactcctccgactgttcaatgtcgaagtggttcagcatgctgtcgtccgtagccgtgaagtcacgggcagcctggcccgccagccaaccggttgccatatccgctatcttggcggcaggcaccaggtagtccatcttctcggagatggtggtcgataccttgttgtcgttgatggagatggaccgggaagtctgcttcgccttgccgaacacatcattctgcgcccattccagcgtttccttgttacgggcagcacccatgaagatgttgccgcaggtcgtgataatcttctgcatccccaccttgccgtagtctgcctccagctgtggcagttcctgaaagcccagggtcaccgccaccttgttggagcgggccgtaccaatcaaacggtctatcttgtggaagtagagtgtaggcagctcatccacaatgatgctcaccgggatgtttcccttggaattgactcgggtaatcaatcggttcagcaccagtgcattcaatgaaccgatgacctgttccttctctgggtcgttggcaatcacaaggtagctcggatgggctttgtccgaaatcttcaagtcgaaatcatctcccgtaaacacccagtaggcttcgggagataccagtcgggctgcattcacacgaagggtacccaccataccttccaactggtcgttcgccttgttctcataagcactcttgaagggtgccatgagggaagcaatcttgtcgtcctgcatcagtatgttgaacacctggtcgtaggacctgcctaagaaggaaagcacatgcggcatatccgaatactccccggtgatggtgtccggctccacttccttgcctttatcatcctcgtaccagcagcgttcaatcttcaccagcttcccagtcctatctttgtaggagaagccgtttaaatctacaaacatccggtcttcatctgttgacacgtcgttgccgtccttgtctacaaaatccaggatgatattgccttttgcatcgagtgcatggtaatcgtcccagttccgtatcaccagttccagtttatttccctcgggtatgacgacttcggagtcttctgccagggaaacgtagcgtttcagcttcttgccattcttgaagcctaccggatggaagttcacaaagaagtagatgatggctgccaggaagttctctgccgagttggtgaaaaacgcttccgaaccgccttttttctcaccacctcccttgttcagggaagccagcaaggtggcagcggtttccgatgctgccgccagatccggaatgtacttacgctgaatcggattgatgcggtcggaatactctacatccgtgaagttgatgatgcgaaaaccgcagtttcgtggcaatctttgtgcctttttattcttgcaatactggtagaaaagtgtcttggccaatgtagggaacttaaaatcgtagcacatgatagcaaatcccttggcagcgtgctgacgaatgaagggatcaatgataccaaaggacttacccgaacccggcgtacccagcacaatcgtcccacggaagggattgatgatgttgatccaacccttgtgcatcttctgcttccagtagtaaatcatcggaatgttcaccgaatagtcattggctaccaaagcttcagactgctggaacgattcgttctcgaagttgaagcggtcttcacctaccttgtagttgtagtacttggcaatgccgtccagtccctgatgcaccagcatggtacctacgactgaacatagtgcatacaggatgcggttggctgggaagccaaaccaactcatgccaatattcatgccatgaaagataaagcacatcccgaccaatgtcaatcccgccagcaccggatagatgaccatcgtcttgacgttaaacttcagcgccttctttgccttggttccgatacagaccacacagatacagattagctctgccaccttgcagcctgacacggagttgaacaccttgaatcgtgccagaaggtccaggataaactgcgtgacacggttatccgccgtgatgggaagattcatcacaatctcgatgatgagaaagatgtagatgcaactgcggaagtagttgtacatctgttgctgttcccgggtttcttcgaatgccattgttattgcatttaaaatacacgttaaacgataatcagaacggaatctttacacccagtaagagtccgttacggaaggtatctccatgcaggaagttgacgttgttcttctggagcagcgaaaactcccagccgttctgaaagacatagctgtattcaaagccggcttccacaccgaggaagaacttcttctgggtggcaccgaactggggaccgagacggaagcggagcgtaccgttcttgtaacgtaccagtcgctgcttatagaccaatccgccatcccaatagtaacccttccaaaatctgcagcaggtgggtttctgccaatggttccccacttcaccatagatttccacggcattgccatagcttaacggatgctcgtaacctatcatcgcattcaaggtgttcggaaacaggaaaccggcattcagcgtgagtttcttgtcctgggcggatgccgaaagcacggcaaacgcacaacagatgatcattaaaatcttcttcatattgggtcggatttagcggtaaatgtaatagtaaggatagcatgaagagttcttcaaaatgtccgaatcaaagccatcggcattgaggatgtcttcgtattcaatggtgagcgcaatgacacggccactgatttggttctctgagatttccagacggagcaccttttcatccgggaaggtcagcttctcaatcaccagcacattgcggtaattcttcttgaacttcttgactggattcaacgaataaaccggtgtcagttcaatggtctgcgagttggtggctttcgtctctttcttgtccgtcagcttcacgcgaagttcctcaatgtcgtaggcaatcttcgtcttgttctgtaaggaataatcaataaagaagtagtcaccgatggtatagatgttattgacgatggccttcatgccgtgagcattcgacaccacctgattgtacttgcgcttgctaccatacaccgcccacgcatagcgcaccatttcggccttgggcatcgatacctcagggttgatataggactgggtatcgctgtaagctacctcaaagatggaggctgccatgctgggataatgggtataaaccacatcatactgagcgatatggcgctctccaatcagggtaatggtgcccaagagctcattctcactgaacgctgtttttacagaatcttgctccagataaggcttgatgcgtaccatgttgtcggcacactggttgcccataatcttggtcgtggagatgtccaccaacttgatattttcgggcatgacgatatgggtagtgacctcactgttcacgtagatcttctccttggcagcagcctgtacgacaataccgagaagaccaaagaaaagtaaaaataatttcgctttcatattgggtaatttttatgatttactgattggttgaattgcttactttattatttgtaatcttgcttactctattacttgtaaccttatttactctatgattagtaagatagtttacctattttcattcttaaccttttaccttgcttcctccgagttaatcagatacacaatcgtattgtacttgattttagccttattcttgcgaatattggacgaaatggccgaagaagctgagttatagacgttttgcaaggcttgcagcgccaaggcttcacctgagataccggaaccatagccatcttccgactggaagttaatattctgctgcacagcactggagctggcatccttcacgaactcacggaaagaagattccggtacatagaacccttccatgccgtcattatcgaacactgaaagtttcacgttgataaacttatcaccgaccagaatactggtaatggtagccttgacacgctgctgtccgaagcctgtcacagttccatagaggtaggtgcctttcttcaacttggtgttgctgacggtaatgtcgtccagcaatttgaaacgaagtctggtaccttccttggctttagtggtctggtcaatcatggcacggatcaacttggcttcagctacatcatcgggggaagttaccgtatgaaacttctcagcattggtatcaccggacttgatgacaagtttggggcgattgcgctccttttcggcctgacggaccttggcaatggaatccctacgttgcttctctgtttgttcatctcggtcaaaacgtccgatacccaatccgctttcaatagccttctggcgctcgtaacttctgcgctggatttcctccaggtcacgggcgaagtcatcttgcgaggtatagccttcggatgttccggaaggattgcctctctgacctgtacgggaggttcctgtactgccagaagcattgtccccgtatacaaaggaattgatgtgtcttctggactcggccaacgacctttccagttcctccatttcccgttgctgacgaagccgttccgcttctgctgcatccagtttgttgagttcgtcttcgctgtagccgtgctccagttcctcgttctctttctgttcttcaccgatggcaccgatagcggtgaaggcatcttcgtccccgaaacggcgcgacatctcatacattttatctccggcttcctccgcattggcttgcggcagttccgtattgatgcggtcggtggcaaccgtctgttgggcgtcctcgctgccaccgaaggtctgcatcacgaagtacaccagggcacacaggggaatgaacaccaccaacgggaagatgtacttaggctgtttgaaattgatttttctgatcatggatggtcattgttttgaagtgatttgacgatggattccagccggttgtaactttgtacgatatggatggaatcctgatggcttttacgtggtatcgcaatgagcgagtccagttcctcccgcagctgttgtccctcttgggtcaactccgtcagtgtagaacggtggatgctcttgttcgcctgaatggtgcggaacccggcaaacacgggctccaactgggcaatgctactgacatccggctcacgattattttgcagtccgataccatctattaaaacggtacttgccaacaggaaaaacagcgaaccggtgacataggcaaaggtgcgtctaggatgtttccttgcccagatgttggccagacggatgcgtcctgccaggcggtatttggtgccgacggctcccaacttgggttgtagccaggagcgtatcaagtgatgcgtcttgagcctgctttcctgaagtgtctttctgaatgctttcatggggtacttattctctaaatgttagtaatctaaatctttattctccaatgtcctccagttcgtaatcatcagtccatggggattgtttcttgttctgggaacagattcgatgaaccctgtagtgaccatggagcgtttcagatcacgggtacggcgcttgatgagctgcgtcccgtagtaggtgaacttccgttcgtgttcatcgaaccggatggaatcacacaggatggtacacaccgccgaagaggagatgatgtcggagtagaatccgttctcgtccaacgcctgcttctgcttgagggcagtaccatccgccatgtacatcgcctttccgaccgtccatttgatgtagtcgttgtcgggaggcaggttaaagaaatactgatggaagagctggatatgggccttggcttccatcgtgaagttcgcttccagctgggcacgctgtgccaggaagggaatgtcaccgtccagtatgtaaatctgctcgcgttctttcgtcacgagcgagatgcagcaccagacggtgaacccgcagatgagggtgcagccacctatcgtggccagcaccgtcatcagggcgagtttcgttttctgtgctaaggattctataagcatagggaatggtttgagtgattacttcttgttgttgctattcttggatttgctcggcctgaccagagatgtggcaccgctagctgcagagccgaccacacttcctgccataccgcctgccatcgctgccatgcccatcaccgtacttcctgctgctgaacctgcacccgaactgacaccgcccggaatgagccacgaagccacttctggaacaaagcggatgatgtaggcacccaccagcatacccatggcatacatgcagttagaaccgatgccctgcaggcccaaggcacctatctgctcccacgagtttaccgaaccgtgaagaagatggttgtaggcaatcaaatcctgctgcaaattataaagcaggatgaagtcgatgtagtagatgcacatgtaggtgacgaagccccacagcgagagggaaaggaacttcgacatccactggctccaggccgaattccagggcggaaccagggacagggcgaacatgatgggacagaaaatcatcatgatggccatgaagatgcgctgcgccaccagaataccgtagtaggacatctggaatatcagttcccccacaaaacggatgacatcgttgatccattcgctcatcttggtttcagccgccaccgctgcccgctgggcatagttgttgatggtgttgcccagattctccacgttgtagatgagcttgtcccaccaggcagcatcctgcccgatggcggctacctgctgggcggtggcgatggagtcctgcacggctctcagccggtcgaggtattcactctgtttctgcgccaccttcaactcgaaagcggccacttccttgttcttggcttttgccatggccttggtagcggtttccagtcctttgccgggaacctgcagggcctgacagatccacgaggaagaagagatacagatggaaatgccgatgatgcgcaggagtttcatcacgtccatgccgcgccgcccgagcatcatcatccagcattcataggagcctacacagagtgccagcagcaagccgaggatgcgtgccagtccaatggcatcacccagcaccgccacattgggaaaggtttccatggcgactagcagcttgtccagactctcgtcaatggcaggcaatccgatggttaatggtactaacagtagattcatatatcattctattttcgttacaaactatattttcaaaggaactcattcttaaactggcatctcaataatgcgtggaagccactgcacagaggttggcggtccgtttgaccagttcctccatcttctgccgggcttcctcgtaagccttctgccttttggcattctccagtccgtaaccgactcccatcttgtggatgtaggcgatgtcggcacagaggatttcattctggcggctcagttcgtccacctggtactggagcttgcccttgcttttctgcatgcagtagagcagtccgtcggtgatgcagtcctgcatccggttgaactcgtccttgaaggaagggaacatcagatccacgttgcggtctgcctcgcggagcagttcctcctgatagagttcttccatcttctgccgttcttcctccaccttcttgattttctgccgctgggtctcttccgccgtcacccgggtgggcatgatacgtttcacgttggacttgtgctccttgaagcgcacccggaagcccgagttgaacccggcccactgccagtacatttccgcacccgaatatttcttgtgcagaaagaaatagtaccagtccggtgcgaagtcccaggggccgttctccatggactgccactgccgggctttttccttgtccttggtcagacgctgggcatgtccgctgtagggacaccccagcagcatcaatgcgatgatgcctgtgatgattgctttagctgacatatcctttgttccattgattgatgacacgattcgcaatctcgtccttcacgttggagttgagtatttcccagatgtagtcgggcttccagccgcagtcggtgatgagaaagcagtagaggttcgcattgtccacgatgtagcgggccttgtcgatggtggctttgagcgtcatcaccaggttcagcttctcgtccatggaagccttcatcaggttgatgcccgaggcggccacggaagcatagagtttgtagcagtgctttacttcccgggctatcgccacgttggcatcggcataataccatcccacaaagggcttcttcttgacatgcttgaaagtgttggaagtaaagtccttgtactccttcaccagcatgtagagcgagttggcggtggaggaaatggctccggccagtaccaggtaggaatgggcattgctcatcttggtgttcagcgtggtccgcacctcgttgaacttgttggcgcctttcgtcaccagcgactgttccccgaagctggtggccactctgcccagtgcctggtcctcgtccttcttgatgcacttgtgcagggctatcagcgcttcaatggtcggcaggtccttggggatgacgactgcatagcttatgtttgaggtcatgacagatagcatcaaacacaatgcgcccaatttctttttccagtgttccatagctttttcatcttttagttagcagccaccagtccgttccagtccgataccagtccctccacatggtttttcatggtgaccatattgccccatccttcgggatcgatggcaaagcagaggtcattcagcgtggcatactgtgccatgagcatcatgccatccaccttgtagcggatctcattcaggtgggtgtagatggagttggccagcgacatccgttcgtagcggtcgagcatgttgtagccgtcgctcttcttctcggcagtgccttctcccttgagcggattgggaatcctcgcattgttcacgatgtttacgaagttgcccaccagctgctgtgtttccatcaccagccctcccaattccgtcagacagtagagctggttggtgaacttcgccttgctgaccgtctttaccagttccggcacattccggatgatgtcgaaggcacagctgccgatttctttatagtacaggctctccgtaccgaagccggagatgttctgcatcgacagcttgtagagttccttcatcgtggccatgctgaccgaatagagttccaccttctgctgtttggcagcgatggtgtccagccgggcattgtgctgttcctcgatgagtttctgggcggcaaggttggacgacacgattttgatgcagttcttgtcgaccacaacccgccatccggcatacatttgcgttgaagcggcaagcatcagtaccgccatcaacaggaatcttaacttgaccataatgacatgactttttgatgttgattgacttttctggcaaattccagatacttatgcccgccgtcccgtttgcggtctgcctcaatgtgcgtgatggcttcctgcatcgttccgtagtgggccagatagagtttgagggcttccttttccgtgcgttcggtggtgtaggcccagtagcattccggtgcttcttccacaccgtacacatccgagttttgtccccggcatatccagacttccttgaagtagctgcgaccttccctgttgttcagggcattgatggtaaatatctgctgccgctggatgggggtcagtcccaggatggcagcaatgtcctcgtagcggtccttgaacttggtctggtcgagcagtatcttcacatcggagttgttgatgatggcctccttcacgatgggcgaatctatcacatcgttcaactcctgggtaacgacaccggctatgccatggaactttctgaccgttttgtacaaatatttgatgtattccgccatggtgggcgaagcaatcgccttccacgcttcctcgatgatcagtgccttgcgtcctttcttgatgcgcatcttctgcaggaacacatccatgataatcaagacaactatcgggaaaagtacggggtcatctttaatcttgtcaatctcgaagacaatgaactgctcatcgaagaggtttacgtccagatcggagtttagggtcatctccaattcgcctccccggtagaactgcttcaggatggcagcgaagtcgcggatgttgaactgaatcttctcctgtgccacgatttgcggaatacgttccaaagcaaactcgtaataggagttgaaggacagttcccggactttcagtcggcgtttctgttcctcgatgtggtctatctgcttgtctatcttgataagcatggagttgttgtagagttccttcttgtagttctcgataatctgcagggcacgttccttttcccctttgctggcagcttcatcctgggcaagggcatagagcgaacggcattggcggagcagcttgagtcgccgggcttctgccggaagcatgagtgccctgctttccgcctgcttgtccatctcggcttctctgatttgggcatcaatgtcttccatgctgtgggagaacttgtcgtagtcttcttccatcttggaagctacgagtaatttctggcgaagtccctcacgttccttctccgtaaacttggtaaagggatggaagtaggcttcgtagtattccacgatggtctggttgatgagcatgtcctcaatcttgcttgggaagtcgttgcctttgaagatgaggaagatgagcgacttgaggaagttcttcttctccccgaagttcaggtcatattcttcctttgttaccttgaaaggattcatggagatgggcttctctttagaataggatatgtaagtacctttataatagccacagataccttcataggaatcacccgtatcaaccatgaccacatctgttttttgctccagcagctgtctgaccacgctgttcatgtggaagctcttgccactgccacttggtccaatgcagaagaagttggcattgtccgtcatcttcactttgccctcttttcccgtgatgtcaatacataccggcagcccttggcgatcggtgtagtaagtagtcaagggagtatcttccgaacctttcaagtgttccttgaagaagaagcacaaagcggcatcggagagcgtcaaaaagaggtcgtagtccggattgaaggcatagccgtttccggggaagctgtcggtaaacaattccaactggttgtaggcggtacgggacggcataataccacactcatacagcttggtttccagataggaagtgaccggagtgaccttgtctgccgggcagcttaccaggatgttgaagttgcaatagaccagctgcgtgctgtccaccgccagacggtccagcacttcctcaatgtcctccttggcaatcttgttgctcgggtcgggcatggagccgtgacgtttggcctttgcttggagttttctcagcagtttccgttggttcggtatctgtaccacctggttgaacaccacacaatcagcatggggcacacttgtcaagaaggagaacaaatccgtagcgatgccgtagccgttgatgttcatctgtgtgtagggcttcaccagcgaaggcaggttaatctcgtctatatccaccaacggataggaacggactacccggtcaccgattttcagatactcgtctgatgccttgaagttggtcatcgagaacgggccatgccggaactggaaagccatgaagcggtggcagtattcgttcacctcttccttggtcagcttccggtgcttgatattcttctccttgaggatgtcgctcactttggaaaccttggaatggaagtccagccacctcttcgggtcgtactgaacgaactggctgcgctgcgcttcctgcgtgaggataaggtaggtacgtatctccgtaaattctcttccctcaaagtaacggaagtagcttttggtcaggaactccgcatcctccggcacctcatggtggtaggactgcttgcagagcacgtcctgtttctgcagggcataaccctcgccgagcgtctgtaccacattggagagcacatcctgaaaaagcatgtactgttccgcatcggtacagagctgctgcacgggattggttatctcgaaaataaccgacggttcccccttggctgaaaaaaggacgacattgccgtccgtttcctccagctgcgcataaaggccgtcaaatattcttttcttggtacgtgccataatcattcattttgttttacgagttgcgtctcagattcttgtaaacatagataccctttgcccgccgtttgttgtggagaccgccacgctgcttgacgtaaatggtaaccaatccgaccactgccatcaccagcatggcgatgaacccggcaagctttcccaaagcgatggagaagccgatgaaacctacgaacgacacaccgatggccgctgctgccaatgtcagaaaacggccgcgtatgcccatgaactccagcggtttctgcaagcctttgaaaacgggataaccctcctgattcatcgtcataattctggatagtatgttgacagattggattacttaaagaagagcggaagagcctcagaaagagcgataaatgcaatacatccgccaatggtcagcatgatggttttcttgacatcctggtcgccgttctgcatcttgaagtagacgttgaacgcccctacaagcacaataacggccgcaatcgctttcatcaaatttgacaccggagtctggtaggaactcacttcctgtgtggctttggtaaaacctgcggctcccttgctgcctgccatcgcttcaccgaccgataccgtaagggcaaagatgaacatgaggcatttctgtaccgcactgcaggccatgaggcggttgactgctttttcagaagaacgctggatagagcggaagatgctttcgtatccgcatacgagttgattgagttgtttcattgtatatttctttgataatggatttcatcgccaaaggaacagaggtcgccaaagaaacagaggtcattcaagtatcagaggtcgctaaaggaacggtagacttacgtccggttggttcgggcgcattcacccggcatatcgcatactttcgcagtgatagattatggtgcccaggtcgcattcaccagtctcggccagctggtcgatggctttgaagatgtcatccaccaggatgccgtctgtcaggatgggttcccgatagctcggtgagaagttggatccggccgaagttccagtttccgacggaactgcttcggcatccgcatgggtagtgtcttcaattttatcttcatcagtagcatcagaagctgatgtggcatccgcattatccggctcagcagtttgagtctgtgatactgtttcagaggaaggattctctgccggaacaggaatatctgattgttcggtagctgttgatgcttccggattggaaacatcttcaccactttcagaagaagcattctcattcggttgttcatcagatgttgtctgctgtttctcagtattggaatcattttcatttccggcttcttcctgcttcttttcctcttccttcttcttatcgtcccggatcacctgctggggctggaaggaacgggcttcatccgtgatgtctatttcctcttcggattgattctcctgcgctgctgcctcggctgccttcagatgctggatgtccatgaatatcagaaagccgtaatagcctatcaagaccacaaagaggataaagattacttgtccgtaggtcatagctgtagttataggaggtttgacaatacaatggtttcctctgacggataaggcaggaagcggaagcccagtttggctcctctcaactctgattcctgaatccggtgaaggtcatccgtataataaaggataccgtattcctctccggcaatgtagcctttggacttgagccatgaacggagtcttacccgtgcccggttggacacaaccttgatgcgggtgatgggactcagcccgaagataaccctgcgtctttccctccgcataatatcagaatggattcgtgaaagcaccttaaaatcttccaacgcagtacgcttcaatcccattctaacagcaatgcgccgggcatattcccgtgaaattcccaattccttgcctatctcagcataagaccggtgagcaaaatgattgcgtacataatctgcatgctccatccaacggcttttgaccgctttcttaagccccaagctgcgggccttttcttttacagcacgttcgcacatacccaaaacctctgcggttctcggggttgtttctatgggatagagctggataagaaccgcaatcttctgctctgtccaattagtccttttctttctcataatctttttgattgaaatttgtaaacaatgatttcttttctctgcgaaacggcacaagctgtaaaaggtaaatatcaaagaatgtacggacaatggcattgaccatatccgaacggctgcggttatggatgttgcagtcatccagcgagtctgccagatcccggtccagcctgcataccagtcgttcgcttttgacattactttcatcggaaatttccaaatttttcagaaatcctgtccaataatcttccacctcctttgagggagaaagatggataggttctccgtcagtttccgttttcttctcacttgtaccattcgtccgatcctggaggccggatgatttttccaacatttcgggcaacttgtgcgtcaggataatgtcagaatcattgatgccttgtgtcaagtcaccaatttccggaatgtcttttttcatgcgctatgttatttgatggttactgataaatttaatctcgtcattcatattccgttttttccttatcggttgtatcagcagacagacctcctgcttcgcgttcttcttcatttccatcttcatccatggcaatatgtgtaacaccttcttcccgtttttttttcttgcctattttcggattaagattatccgtcagttgtattccggtaagctttgcctccctcataggagttaccttgccgaaaatgctgaaatagattttgtcgaaaacattgccaacataacgaatctgcatatccagtgcagccactgtactgaaccgctccatatcagcccgcctcggtatttttccggttacataaccgtaattagaaaaagtttcccgtgtgttgtcccaaagtatcagttccgaacgctttcccacccggttgtcattgaggttgggaatgatgaagagttgggcattcatacggtctccaactacctggcgaagtctgtccagaaaaagcaggaaactggctgtggaaggaacggtcaccaggtcatagtggaaaggaataacgatgatatctgaattgacaaacatggggaccagaccttccgctttcaagcttcccggtgaatccataagcaccacatcaatctccggatcattatgcagcttttcaatcagggaggtcatggccgtcttgtcatccggctcataagcccacacttcgtaaggcacctgttcctctccatattttttaaggtccgtcttacggcacttcataatcgagtgctggaaatcacagtcgattattaccagacggacacccttcgtcaccaagtaattggcaaaggtcacacaaagagttgtctttccgactcctcctttctggttggcaaaggttactatgacaggggtctgtatcatgttgtttttcgcttgagttaaatttgcaagcaaaaatatgtgcagagatattgaaaacctaaatgcacaacatcaatgtgcttgagattgcagaaacatgggtaaataagtcggatgaacctgggtttttcaatctatatgcccgaattggttgcagtaggcagtcccatgaaagtctttcaaaaaaatagtggtccccattggttgtccggttacggattatagccatagcctgtttaacaaatattcgtttatctgcatgattaaaacaatgttactttcccgtaagcaagtgtttccttcttccgcaaagaaccagaagttccttacatctttaatgaacgtccatcatccacatcattggagtcggtcttatttccaacctcccattcgcggttggcgctgtgactgccttctccttctttccggagtttgcccagtccttgatgagacttccgctgcagactcttgaccggattgagcgtcttcttggacttcttgaacggcacaccctggcgcttctgctttttggatttcttcttcacccgttccacatcgaagtcttcttcattcaggttgatgagaatatgttccttgaagttgatggcatagtaggtatcatcgacctgacggatgatgaagccttcctgatacatggcgctgcggggggacttcacttcgggatcattgaagatttcatgcattcggccgacggaatcggcatacttgggaggacgttccgtggagatgtccaccaggtccggccggtccaccttgaataccttgcacagcatttccacttcggcttcgttctgcggacggaacttctcgatgaagctgatgcggttgttccggtcaatggccttggccatgaaaggcggcaagggtctgctttggccatcgtagtagatgacacctttctttatataggcacgctgtttcttgagtttctggaaaatttctccctgagtgattttgggattgagggtcagtagccggtctatgaatgcttcaatccggtcaaagcgttgttcgggagtagcaaagtccagcagttcttctacggctagaacccgggcaccatggatgacggtcttgttggcatggtctatcagcatatagccatagggtttgtctttcttgccgaagaagaccacatccacgccgaaattcttcttcatttccttctgcagttcttctttgttggcacatacgtccctgtattttttcagataggctctcagctgtcggttgcgtgccttgtcctgataacctttcttgaacagggcttcaatctctgtaaggaggagtttcttttggattcggccgccttgcttgacgaagacgttcccgtctttctggaagacttcatagcccatggttcccatcacggccttgaactgggcaaaggaggagaagctgtactgcttggcagcctcgatgtctttctctgtcttttgtgttctgtcggttccaagtatcttgtcaatgaccatctgcgagcgtctgcgctcatggtcgtgctgtatcttgcgaccatcgggtgacactctcgaagtaacgatgtgcaggtgtgtattgtctgtatcgtgatgggcataaatgagccagggttgtccgggttcggcataccccatttcctgcagataccggtgcgcgaaatcaagcaactgctgttccgacatttcatggcctttgcaggaaatggctacatggaactgcggtttctgaatccggctgttctgggaactgtagaacttgagaaattgcaccagctgtttggcggtcggatgttccgaggcatccagtccaccgaagttctgcatctccagcagggtagccactcctttatagaccttgtgttcgttgtaaccgactgcatggaagtctgcgcttccgggaagtatggttgctatcatgatttatctatttgtttgctgattcataaaatttggggttgcggaccagacagactaaaattcccggtcgcctgtaaaactggatacaggttagtctattcatcacacccaaatacaaaatatccgtttacctttacttaatcagccgtgttctgttgttcaaagtttccaagtcatcctttatccttttcaagatgttctgtacatcctgaatcgaagggagcaagacttcattcacataaccgggtgacagcagtccggcaaccgccagttcgttgacccgtctgaccgactgattcaggttgctgccagcccaggacagttcgttctggaacttttggtaaaatgcacacaagtcctgcatcatctcaatctgttgtttgacatccacatgggtaaattcttcaacagctttgcggatataattgctcacggactggtagggaacggctttttccttcagattcaacagttcatcggaggtaagccgtaactgaaatactttggtacgctggttcttcatatgccttgactttagttgttcggattcccggacacctatttcgcgaagcgaaacagcgatgcacatcgctccgctgcacggcagtcggcaagttacccttgtgaggacaaaacttgttttgtaatgacaagggtacaacttgcttggctccatatgcaacgcagttcgatgtcttccgggatgatttcagacccaaattaccgcaaaattttgcgaagcgcaaaaatgcacaacatctttctgagagaaaatcttctgttaaattcacctgtgtatcaagcattcttgtgacttgcattcaaaggtttcccaagttcctgttcattgactccttgttcatccatatcatggtgaaatgttcacaaagcatgaagtaaaaaccgacggttgttcatgtagctatagaaacaaggtttgaagtttagctgtcggaggcatgccagttacatggctgcatcattctgcgcttgtttgcttggtgttgcacagttttcataatgagtgaaacaagagacagaggaacaacaaatctgtaaacagaagaatgtgcaatcatattgccatgtggccattagctgaaagacaataggacatatagctatggcatcagtctttattcaacctatgtttatatttgcttgtcatcaaaatagccatgacaacacaaggaaaagagcattcagcaatgaaaatctgtaaacatgcgttctgtgataaaagggaaaaaagaacaatggtactggcaattatggaactgaacccggagggataaaaagaataaggtgtaatcgtattgtagaacctacacattctggacattcaaaacttcgggcatatcaacatgatgttcaaagttgcagagtgacaatgtttgacaagcaccgagttcatggtcataaaatgcagaaaatgaggttgaaaaaacatgtattgacacgaataaaatacagatgattccttgcgtatctcattgatttttagtatatttggtaataacaatctacctcggcagagattttttataactaaaaacagatgaccatgtttgaactgttactccttatatatatgttgccggtctgcattcttatcggtttgctgatacggtttgcactttggcttattcgcgtaatgctgcggttggcattatggctggtaaagaaaactttcgtcttgatatggaagctggtgacgcttgcgtttgtgctggttatttccggcaatctgttccggcagcattcggacggataaaagtggcatgaggaaaggtacaatatggaaaaagccgtatcttcctgttggaatgatacggcttggtaaaggtgtaacgggtcttttccctcgaagtaaggattgaactgaagcaagtcggttaattgatgaaacagtttttgaagccatcaaacttgtcggcgacttgcatcatatcctgctcaattttcttgttggtgatacgcgcatagatttgtgttgttttaatgttggtatgtcccagcatctttgaaacggactcaatgggaacacccttgctgagcaacatcgttgcaaacgtatgacgtgcaaggtggtagctgagacgtttcttgattccacaaaggtcagcaatctctttgagataagcattgatcttttgatttgacaggactggaagcagcctgttgtctttagtctttcctttatacttgtcaagaatcatttgaggtatctccaacaaagggatattactctgcacattggtcttctgacggttgatgataatccacggacggttatcaagggtgatgatattttcctgcgtcaggtgagccacgtcgatgtaggcaagcccacagaaacaggaaaagataaaaacgtcccttaccatttcaagccgaggaatctcaaaatctttctgcatgatgcgctgtatttcttcatccgtaagaaaaccccgatccaccggttccaggtgaaagtggtggttcaagaaagggtcgtgcgtcatcacgccgcacttctgggcaaagatgactacggtcttgaagaatttgagcgtcttggtagccgaatttgacttcagggaaaccactgtcttcaggtatatttcaaaatcatggataatcagatgcgtcagttcacccggcatgagatcctttctgccgtatttggcatggaggaaattcacaaaatggcttcgggcagccgaatatttgtgatacaaggctatgctttttcctgcaccaacctgagccttgatgtcctccagatacttgtcatagaactccacaaacgtagtcttgaccttattcttgcccaaaaagatactcttgattttgtcaagggtcaggtcttcgtcaaattcatgcttcttgaaaatcatctgcagcgaatttgagatgttgtccaactgggcattcagattcaaggattcgcttccacgcccctttacccggttggtggaattgttccatagcttcttgtcaatgtagataccggaagaaccgacattcagcatttcaccattcaggaaaatccggatcatcaagggagactttccctgcttgttttcgtagtttgaacgtacatagtacgacactttaaaaatcattctcataacgactcaattttaatgtagcaccatggctacaaagttctacataatcagttatgaatcaatgattttataggcttcaaaatgggcttcatttttcggtcactgctacatttttttgaggggtcttcaaagtgtagcagtaaatgtagcaaataatgaccgaactttgaaggctaaaccctacattcaggccttcaccttgttggggcgcaaaaataaaaaaagcaccgtaatcagctgatatacggtgctttgaatgactttttgaaggcttttgtgaagtccttcgtttttgtttcagcggagagacagggaacgattaacttttaatttccctattcattatcagtatcttaccaaaagcctctgctcctatgacaccgaataattcaccgcgtatatgctgcaactttcttcctgttacactcttacttacttttacaaaagtagcaaaaaaatagcataaatacaaattatccacttgatttaacgaatataatttctataattttcttccaataacaattgcaatttagaaagaggataaaggaacttaccccctatgacagtataagctatcccccgttcatcacgtaacttttgcaaagttctgtttgagatatgcaacatgccacatatctgttcaccggtcatatagacctcaccagctataggaacaggcaaatcctgaaattcaagtatctcttttgagcatttcttaagcatcctcatcatcattatgtactcttctgactgccttgtgattactccgtccatatgttatctttctttttgaattaatattttggccaaatcactctctttatacatatatttgccgcctatacaagaatatggaataatcccgtactccctatagccttgcaaacttcgtttggagatattcaaagccagacagacctcctgggcatccagtcacttttccatttcaaccggaccaattttctttttaacggattcaatctgggcggataaactctctatttgcagttttaactgtaaatacgcatgtttctctataacaactaattccataacaatttgatttataatttcactatttacaaagcaaataaaagcatatttccacacttgacaaaacattcaaaattaaagtcatccgttggcgtgcattgtcactccaaatataccaaatatcctcatccggacagataacatatctaaccatttccgtaacccagccatcggtttctactccttccatattttcattccataattatacctattatgactgcttatttccgccaaaatgtcatttacaaaactgaaaaaattcaaactaaggttactgctaccacaaaataaaaagaaaagccccgttatctgcatccaaacagtaacggggtttcccctgccattttttatcaccctatatctttatacccttattttttttcacatgctctttttcctttacgtctgttttccgccgtatttccgaaaagtgctctttcaacaatttccctgccagtttcttcgccttctcctgcatcacatcatacacatcccatctgttgcggcccagcagtttgttttctatcttctcgaatttatcgtaaaaactgaagttgtccgggtattcatctatcagtccgtctctcggatagcctttatccatgatatacagcagtgtcatccagtcataattatacggactccgagtaaggcccagcccctttccggaatcagtcagcctataatagttctcccatgtaggagcaagatcataacgctcactgtccgttatacttttcaatgccgatttgtccacaaaagcatctgccggaatcttctccaacggcaacaaacagccgtaatcatcgcaacagcggtttactttcccttccatcaatgaaggccatccccgtaactcatacacattcagatacttttcctcaaagtccggttcaaagaaacgcttctctatattcgttgccataaaatccccgtattgacggtttcctacgtaatccctaccgaacagcagcacccctttacccgtctcaacacctgtataatacgtgttcccatgcttcaaatcatcctgcatctccgctatcacttcgggtggtgcggactttatctcccgccacatctccggtgtaagttgtcggggatagttctcgtcccttgaaagcgggtccatgtactttcacaggcaatacaccacttccgacagagccaggtatctatgcggcttaatcccatgtccgtccatcgccttttccagtcttcgcagataatcatcattattcccttcccgcaaacgcggaataatcctcatatcaggcacattatagtacatcatgcccatggtaggcatttccgtttccttgagcgccttctccacatctcccagcataaactccagaaaaccttcctcacccgtacctttcatactgacatgcaccgggttgagatgtccgtccactgtgacatacacactgccactgttcgtattctctttttccattcatcaaaaaattaaatgttcattccttgtccttttctctttgccggaatccgcaccctcatttccacgttcgggaaccgtacattatccggtcgtgccaccagtgacgagactatccgttcctgttctccggtcagcggcataggctgccgttgcaattttctcagcctgttaaagttcctcagcgtaggtgccatgtcgcaacatgccacacaaatcccatatctcaccatatccgaagaaaccgtctgcccgtcacctatttttgcccggcatgcggcattcagcggagccacctcataaaacctcaaactctcaggtttccgcttgccgtcaaaaaaacgttcggccagcccactcagaaactcatccagcatcctgtccccaccgtctgtcttgtcaaacagcaataccttccgcccgtgttccaccgacatgtaggtgggaaaagcagccagcccgctgcgtatcacatccccgttcattccgaaacgatgtcgcagccgcctgtaatcctcattttccagcaaatccgtatgttccgctgataatgacagatgtacaatcccccgttcctcacagaatgccgcatcccggagtctcaccacccccaacggatatatattctcccgttccagtacaggacagagctgttccagataatccgcattgtccgtaccgaatatgggaggaatcagacttttgtctttaaagtcgaaacggaacattcagtggtcgggaataaattcccgaccggtcgtatgagaccgcacgttgttactgatataacgggaaaatccctcttccccctgtccgcgcatactcagatacacgggtctgtaaaaggcgtccaatgtcatatacagactgccgctttccaccgcttgctttttcttttcttccatagattctataggattaattgtttcttctccttcttctgtggggtaatggaagctgcatgcttcacctgccgttggctgtcagacatccgctgttcaggagcttcctgcctgtagtgtgtttccggtaacccgccggtctgttcctcttccgaatgcggatacgacaccggatgtgacatttccatcctttctattcggcttatccgtgcgcccaacctgaactctccatccgtaatatggaactccgattgtaacaaatccgccgccatctcctttgcctctttctgtaaggccgcatagccgaagtcgtgtgccgacaaaggcgcgttcatccgtgccctcatgctgtctcccagcttctccgccagttccctgaactcatactcatagctgaacggatgcaccttgtctgccgcaacaatcccggcgtacccgttttccgaaatatacagcaatgacgctacatcatagttccggggcgagatacccaaaccgaattcttttgtcagccggtcgaagttatggaaatcgggccgcaggtcgaactttgccctgcacaccccaccgtccagcacacttctatccgcaaacttgtcggaggtgaagttcaccaccgacctgcgcaattgtgcgtctgtgcttcgcaaatccgctttggacagcttttcgatgcagttgtccgccagcccggccacccgtttggtaggcaggtcaatctcatatatccgcaaagtttcgggtactttggtcacgttgaagaagccgtcggccagatgttgcagatagctgttccgtgccttcatacccttgggggtgtcggaaaacagtatcacgccctcttccgtaaccaccgcatatacccggtttttcgtcccggaagtttccgttaccgccgctttccgcctgtccggtttccgggcaatgcggttccaaatatcattcaggattgacatagcttgtatttttagacatgataaccggcgacaaagaaaaacattcagccgccaatctgcaatacctcatacatacgagtcatccgttggcggctgttggcgtacaacctttacgccagccgtgcgtccagcatccggttataacttttgcgcagggagtcgatgaacggagtggtgtccgtacaacggtcgaacaccttgccacgcttggtgtacagcgcattgattttcagacggaacacttcctcgaaaacgcggataacatccacaattttcaaattccggccttcagccgtacctatcgcaccggctgccatcagtgcggccaccagttcaatcaggtcgctgtccgtaccgttccatgtcagtgtgacggaacttttgcttccgcttccccgcactgcttccgcatggaatccggcagacacagtaccatgacgaagcatctccttcagtatttccgcttccgcatccagcaacgccaacgtcttgtcgataaacacgtcatacaggatattgcggcaatcttcagccattccgttgcaggcctgccgcataaaggccagctctatttttgtgtagttcagacaacgtagctgtcccgtcaggtcccctgccggtgaaagcgtagcaaggcagttcacgaaatcgtcataggcagccggcaactcacctagcgcaggtccggcaccgtttgtataagaggcgaacagattaaaaagagaggtttccaccaatgtcttcatcgtatcatgtttttaggttccacaattcaactctccactcatcctgccggaataaagacaagtgccatgcctgaaacagtacacagataaaacattggaaataaaccatatagaaagcagtaaaaatgatgtgtacataaaagcattgtggattggacatgatgtgtccgaatttcggacatattctaatccagacgatacttcctcagtttcagataaagcgtgctccggctgatgcccagcagccgtgcggcagccttcctgtcattgcccgttgcctccaatgctttcagaatggttgcccgttccatccgctcgtcattaagtgaatactctcccggttgcctgcctttatcgggaatgtctatctccccggtggttatccagtcatctttagccaataaggtggcccgtctgacaaccatcctcagttcccgtatgtttcccggccacgaataagatttcaaccgtttctgtacttcgcggtcaaagcctttcactttccttgagaactcttgattggcggcatccagcatgaattccgccaacgggataatatcctcaatgcactctgccagcaatggtacatgcaacggaaattcattcagacgatggaacaggtcttcccggaaacgtccttcggctatcgccttctccaggtcctcattggtagcagctaccagacggatgtccgtctgaatctcctctttaccgcctacgggacggtagcgtttttcctgcaaggcacgcaacagtgccctttgtacttcggcattcagattacccacctcgtccagaaacagtgtcccatggttggcggcggcaaacatgcccgtcttgttttccgtcgctccggtaaaggcacccttcacatgaccgaacagttccgatgccgccagttccttcggaagtaccccgcaatccactgcgatgaaagaagcatccgaccgaccgctcaacacatgtatctgccgggccacatactccttgcctgtccctgatgcgccacgtatcagcacggctaacgtatccaccggagccaccagccggatatgctcctgcaatctcaatgccaaagggcttttgcttgtatagaatctttgttttgtattgccgtcccttctcttacgttccaatgctttccggataataccgagtaccttttctgtctgcacaggtttgggcagatagtccacggcaccttttttaaccgcttccacggcaccgggtatatccccgtagcctgtcatgatgaggaaaggaatacgatagccatgtgtattcatccattccagcagttccatgccattgccgttgtcgagacgaaaatccgataataccagatccacatcatggttgtccaaaaactcctttgcattgtccacggataatacataacgagcattgataccatttttcaccagccagtttgtggtagcacgtgcatacacacggtcatcctctactatcaatacagtttccatatactcttttctttattctttttgctttctctacagcatgttccacagctttaatcagttcctctattctttcgtccgataagccaccccatttttcggaaggcatggaagccatttccctcagttcactttggggaatgtttatacggatcatttcccaaagcggcgcggctttgtgtatgatacttcccaacttcttataatctcccgtggaaaaagcgtcccttattccggcaagttcacccatggtatcctttatgaacaggtccagcatctcttccacgttttcctctccttccatgatggcagcaaaagcaggtcgatccatctgtgaaactgccgccagcaactcttcctcagagaaaggcttatacagacagtcggcaaaacctgcggtaagatactctccctttttatcggaacgtgccgtgatggctatgacgggaatctcccatgcccggggaatgttcgaggtcctcaacagctcaaggaccgagaagccattcgtaccgggcatctgtatgtcggtcagcagaaggtcgtatttctgtttgttcagacaatccatcaactcccggacatccgagcagcagtcacagtgaatctgattacgggaaagcattttactgatgactcccagctggatacggttgtcatcaatgaccagcacacggatatcaacgggcaattcacaaacaggagaaaacttctcttccggacagacggggtgtccggccggtagcataggcaggaaaacagaaaaacggctgccctcaccgggtacactctccacttccacatgcccctgcatcaaggatacgagtcgggccgtgattgccaaccccaacccgaagccggggatattacgcgcattgtcgagcctttcgaaagctccgaatatccgttttttctcctcaaggcctattcccatacccgtatccaggacagaaatatgaagatttcccggccggtattccacctcaagaaacaccttcccgtgaaatgtgaacttcaaggcattggacagcaggttgccgactatctgccggatatgcgagctgtcacagttgaccataacatccagaccggagaaagatgcagtgaacgcaagttttttctgccgggcggcaagacggtggctgtccgctatttcttcaaacagagttttcaagctgaagagtgtgtttttggagtgcgtcccaccttcatccatccggtgatattccatcagcgtgtctaccagagcgagcatataatcggacgaatgcaggatattgtccagataaccgaccctgcaactaccatcgctttccgaagacaactgttccgcacagcctctgatagctgccagcggagcacgcaggtcatgggccactgaggccatcagctccttacgtgaacggagcaattctctattccgattgtcggactgttcaaattccctctcataccgaagacgacggttcaaatcccggtgaatgaggatatacaatacaattgccagtaaagagatagacaaagccaagccggctaccacatagtaggaattattccgttcaaggacaaaggttctgtagcgtgcagcaaaacgttcgttattctcccgttcaaattcagagactatgctgttcatcctttcgttcagttccatgccgccaacgtataagctgtccatctgtgcctgtatttgcactaatctttcagcctgttccaaggacagagagtggagcatacatgttgccattccgattgaagggacaatgaacaaagagcaatgcctacattcgccatcttccttctgtcgctgacaggcaaatttattctcttttaatggaaaaatatcccaaattcccttcttagaactatctctcgtaccggatttaaacaagaccatattcctcttttgctgcacagcttgtctcccagcagtcaaaataatggaagggatactttcctgtacaatatcgccaatactctgcaattcattgaaagtatgcattgtcttggaaagaagaatttctttattccaaagaagaagacacaatgagtcaatacggtttttttgtaagggagtatggacatactcctttaggagttgcagactgtcacaaaccccatatcgtttataactgtagttcttcaaatcgttgtcatcccatgttatggcaatttccgcatgagtagaaagatccaataggcctatgtaacttttttctgctagactatgtatcgctgccaactccttctcttctttgcgcagcatgtgtcttagtacctgttccttgcggaactgatagacaatgaaagctaacagtaaaactaaaatagcataaccgaagcatatttttaactttaaccacataatgataccgactgtaaatttatataatgttcacatcaataagtgcaatatctgaaaaggcaaaataaaaaacttattagtatatagtgacactaatactaaatcatcttgtattgataaattgcattgataatgtagtgcttttagctgattgacaatcaaattttactatacattaaagctctttttgtttttataattacacgaacttttcaattttaacaatattaagaagagaaatagaacatataatttgtatatagtgtatctaaaaggaaataagaacaaatattcacattataaaacggaataaaataaggtgtttttttttaaaatcctaacagtttcatcaccggacttataaaatgacctattctgccgatataggaattttcctgttgtttcaagtttcggaaggcagtcaattcctttatcttctgttcttttgttgaaaagtctttttctgtctgttctatccggctgatttctttgtcgagggcatcaagcttttcagaatgatggggataatatccaagaaaccatacgatgacagaagctacaagaatgacacttccccttttatgcagatactgtttggctttttcccacatatgtatacagatggcgcgtgtagtaggcatccggtaaggaggcagtttcattacaaaaggaacatcctcgttcttgaataaaaactttctgaacaatctggccatgcataccgcagctgtaatacctgtaaggcataagactaaaagcatggttcccgcatattccgcaaaaaaagttctgcatattaatacatagagaggcagacgggcactgcaactcatcagagggacagccagcatggttatcatgcggctactccggctttctatggtacgggtagccattacagccaatacgttgcatccgaatcccataatcagcagaatgaacgacttgccatgcaagcccattttgtgcatcaatttgtccataataaatgctgtccgtaccatatatccgaaatcctccatcagtaatatgaaaaagtacagaatcagaatttgcggcaggaacacaatgataccgcccacactgtttataattccgttagtcagcaaatccgccaacggaccgggagcaaaattctcctgtaccagttgttccatccagctcatccaggagtcgatccatcctttaggatattctccgatgacaaaagtggcttcgaacatgagccataggaagaaaatgaacagagaaaaaccaagcaacttgctggtggcaatatggtcaatcaactttgttttgtcttttttatgcatgggattttcatgataagtctcccggagtgctcctgatataaagccataacggacatctgtgaaagcggtttccgaatcagtctgcaacaaatcttgaatggtgtttatagccttttccctcactgccatcagccgggaataattcccccatctcttgaccattctttctatctccacatccttttccaatagtttgatggcaaggaaacgtttggaaaaacgctcggctacgttcccgtagattttcaattccttatgcattctatcaatttccgtttccagcgtattgccatagtttatgtgtatatggcgcgtcagcggttctttgcctcatacacttctatgatttttttcagcaagctgtctatgccgaaaccggttttaccgatagtgggtataatcggtacacctatcatccgtgccagagatacatagtcgaacctgtcgcctttcttctcaagttcatcatacatgttcacggcaatgaccatgtgggtatccatgtcaatcaacttgctggtaagatatagattccgttcaagattcgatgtgtcaatcacattgacaacaatgtctggctagtcctctttcaagtatttacggacatatagttcttccagaatataggtggacaaggaataagttcccggaagatctatgattttaaatgtatattcgtcctgggtgaacacctcttctttggcatctaccgtgactccactgtaattgcctacatgctcatacgctccagatgcaaaattgaacatagatgtttttccacaattcggattaccgaccagtgcgatattgatagttttccctctgtctttagcaaatcgaataaaatcttcgtgtgacagagtagtaagtgtattaacctgtgactccgtgtctgttattgtaccatattcgtgttgatattcattcatgcttacaacttccaccagctctgcatcacttttgctaagagaaacattatagcccatcaccttgtaatagacaggatcgcccaaaggcgcactccggacagcctccacttcttgtccctgtacaaatcccatctcgataatgcgctttctgaaaggccctctaccgagtactttcgtaatgattcctttgtcatccctttttaaatcagaaagtttcatatcaatattttaatgtttgatttttatcttttatcggcaaagttagagcggattatttgcaatcttgttgcatgtttttttgttgtttcgataaaaaactgtaattcaataattaatgttatttctaaacatatttgcaacaagattgcaaataaaaaaatgtatttttgcagtgctaaaacagataaagaatactgcatggaaaaggcggtataaaataccgccttttccacttgatagctttactgattgttgaactttaaaaattcatatccatgtcaataaagcaatgtgaagacagactgctggacaggggactacgtccgaccccggcaagaatcctaactctacgtaaattatccgaactggaatatcctgtttctctgcttgaacttgagactatgcttgacacattggacaagtctaccatttcccgttcattggctgtactcctgaaacgtcatgccattcattcatttgaagatggaagcggatcaaccaaatatgagatttgcagaagtacggtggaacattgtcctatagaagagcaacatgtacatttccattgtgaagcttgcaacagaacattctgtatgaaagagcataaaatcccaataatcagccttcccaatggctatgcaatcgaaaacatcaattataccataaaaggggtatgtcctgaatgccaatgtcaacaacgaaaggtattgacaaattaggagaaagacaataccacataggtgtaaatattgagtttaatatagaaagagactccttatagtaattcttatggagttactctttctttatcatcattgttgtcagtgggctaaaatttcgggctctgactctgtgattaaaatggtatactcccattgtgcagacggcaggcggtcttctgtataaacagtccatccgtctgattgatccatcacgactttccaagtacccatattaagcatcggctctatggttaatgtcataccaggaaccaatagcatacctgagctctttctaccataatgcaacacttccggctcctcgtggaactgtattcctacaccatgaccgcaaaaatcacgaactacagaaaagccattgcgcttggcatggcactctattacatgacctacatcacccaaaaaagtaaacgcctgagcggcttgcactccctttttcagacactcttcagtaacacgtaccagcttttctttttctgaagaggttttcccaataataaacatccgtgaagcgtctgcataaaaaccgttaactatcgttgtacagtctacgtttacaatatcaccttcatggagcacctgattctcattaggaatgccgtggcacaccacttcattaaccgaaatacaacagctattcggaaaaccgtgataccccaatgttgcaggaataccctggtgatccatggtatattcatacaccaaacggtctatttctgcggtactgataccttcccgaatattttcctccacacaatccaatacagctgtattcaacagtccacttttccttattccttcaatttgttccggcaatttaatgagttttcgtgagggaaccagtctgcctttttttcccaatacatcacttttttatcaacttctgtcaaaggcatgcccggaatgggatgccattgatactttgctttcttcatcttatttaaattttttagccaaaatacggattgaattcaacacagctaataaagccactcctacatcagcaaaaacagctccccataatgaagcgtatcccaagacccctgccaacaaaatgataactttcatgctgatagccccaatgatattctgccatactatacattgtgtggcacgtcctatttcaatggctgtagccaccttcgatggttggtctgtttgaattaccacatcagcactttcaatggctgcatccgaccctagaccacccatggcaatacctacattgctaagagccaatacaggtgcatcgttcatgccatcgcctacaaaagctacagtacgagtagcatgaaatgacaacttctgaatataggtagctttgtcttcaggtagcaagtcaccatgtgcctgcggaatttccagttcgcgagccactttttccactaatgattgcttgtcgcctgatagcagatggatatcttttacgcctaattcctttagatgccggatagcttgtaccgcatcctctttcaatttgtcagccaaccatacagctccggcatatactccgtctatagcacatacgacaaccgtcatttcagattcaagtaccttagatggtactaccgtcttccgcatcaaaagtagtcgtggattccctaccagtacattttttccatcaataatggtttccacaccatatccagctatttcctgcatggataaggccgaatgtaaggaaatatgctgcccccgcacatactgctgaatggcttgtgcaatagggtgagtactcttctgttcagccgttccgatgattgcaagcaattcctctttcttcaaggtagcagcttggacagatgctacttcaaactgcccggtagtcaatgttccggttttatcaaaagcaatgctgtctaattttgtgatagcattcagataattacctcctttaaaaaggatacccgcacgggaagcagcaccgattccaccataatatcccaaaggaatactgatgatcaaggcacaaggacaggaaatcaccaagaaaaccagtgcacgataaagccagtcggcaaatacataatcgaaagaaggagctaaccattccaccactgcaggtattataactaccagtgccgaaaggaatagcaccaaaggcgtataaatccgggcaaaacgccgtatgaacagttctgtcggagctttccgtgcggatgcttcctgaaccaaagagagaatacgagctaatgcactctgctcgtaaggacgtttcacttctaaatcaaccttctggttaaaggcaatcatgcctgccagcacctcaccgtttacctcaatagaacgaggcatactttcacctgtcaaagccgaagtatcaaacagtgccgattcgtttatcaatgtaccgtccaacggtattctttctcccggtttcacctcgatgcgctcacctacctgcacctccttgggtgccacttcgataaaagctccattccggaatacctgggcacgttccggacggacatccagcagttctccaatattcttagtagcacgttccacagctccatgctgcaacatctcccctactgtatagagtaacattacagctacagcttcggggtattcaccgatacagaaagctccgattgaagcaatgagcatcaaagtgaactcattgaaaaaatccttgtcacgcatgctgtgccaagcagcatgcaacaccggcaaacctacaggcataaaggcaagcagataccacacagactggattgtaccctgaaaccaacttagctggatatagctcatcacgatacctgccaacaacaacatccccgaaacaagagagctccatttaccggacactccatcggcatgatgatgggcacagcaagagtcggcatgaggtgaagatacagatggggatacatactgggcttggcagcaggattctgctgcatgtagttgttgaaacggattagaatgtattgttttcatactgagatatatttttctttcacactgcaaaggtagaacatatctcatacaacttggttgcaaagcacatatcagcacctgaaagaataaagacggatgccctataaattaagagcatctgccttcttctttaattacacggtcacactacatgcttacgactctgatccggtcagtaaaagcggactaagcagcttttgccccttctccccatggatatgacaatctgcttatacgccatatcagaaacgtcacaggcagcatatacttccggaacagagagccagtttgtccgtgatgatttcatccgcattgtttacttgaacaacatcccggaagaaaaaacttctatagagatcatattttttctgttctttaattatatacattatctgtaacaaaacacagagacattaaaaagaaagaagagaaatacacattaataaggtatttctcttcttggcacaatcatctgtggtttatttatgtacggaaaaaatgactattttcttttagttaccttgagaatgtccgtcatggagagggatttcataaaaatcttctgccccgatttcttcgataatatgtgtaccatctgatgaaatatatcctacagatgtagcataacgttcccaatcggaaactaactccttcagtttgtcggtatattgatgagacaaatcttttttctcggaataatcacgacttatatcatacagcttccagtgcataccgtccccataaggaggaagtagaagggtcgctttccactgtccctttatgactgccttgctttctgccatttcaaaacagatggcctcgttatccgtgcgtgacggtgtttctgatgagaaagtagcacggagagattttccataaagtggtgcaagcttcttgcccctgtacacatccggtctggaaatcccgacataatccagtactgtaggaaacaaatcagtgacatgcatcaagttgctggtatctatcttgcctcgctgtacatccagaccagaaacaatcaatggtacacaaatacctccttccgctgtagtcattttataatacgcatagggcgtgttgcaagcctccgcccatgcctttcctaaagatacatcagtacatttgcgatcatgacagttttgttacggccaagaaagtatataaccgctatgcaggtttctcaaaggaatgccatactcttatggtactcttcagagaacagattgaatcgtataaagaaaagataggcaaaggaaaggcggaaagcacttaccgtggactggttgccgactacaagagtcttttgcttttcatgaaaaccaaaaagaacatcgaggatatagctattgacgagcttgaaaagtcgttcattgaggactattacacatggatgctcggcacggcaggcaatgcgaatgccaccgctttcaaccgtgtcaataccctgaaatggccgatgtacatcgcgcaggaaaagggttggttgcgagtccatcctttcacatccttcgagtgcaagccggaatacaagaaaaggtcttttcttactgaagaggaattacagagaatcatccacgtggagctgaaatacaaacgccagcgtgccatgcgagacatgtttctcttcatgtgcttcaccggtctttcctatgtggacctgaaagccataacatacgataatatccataccgactccacggcggcacatggctgatgggcaaccgtataaaaacgggagtggcgtatgtcgtaaaattattgcctattgctatcgaactgattgaaaaatataggggtacggatgaaaagaaagactctcctgaatgtgcctttccggtaggtgaatacaatgccatgcggctcagccttggaatcataggcaggaaatgcaactgccgggtcgaggtcatcccgtatcttgcacgccacgcatttgccgttctggccatactcaagaggatgctgctgtaaacccttcagaaagtgtttgggcataagtccatcacatacgtcctgcacatccattcacttgtccggcgcagacggggcaatctttttctggaagtcgcccatctgtacgaccagcgtgctgaccagctttctcaactcctaatacgcgcttgtttcaataattgtcagttccatactaaaattctttttaagattctgaatatgcgacaaagtaacgcacatcctatatcctttccaaacagataatatcagagtcttccgttggcgtgcattggcgtatctaacgttaaaagagaaggcccttcacctgcatccatgcggcaacggaacttccattcccttacttgttttccataaatttataggattaatttctggtgcataatattaatagtcattattctgtctgttttttttgcttgcataattgcagctaacagttatctattccaaaacgcattgttatggaaaatggcaagctgttttggtggtttatggatattgtgtatgataattgccgtcttcgtttgtcgtaaacttgaatgctctaattaaaacagtacggttgtcatgctttgtgtgttttattataaatattatgaattatttggaattgatatgtaatatagataattttgcagtcaagaaatggtttcgggaggtttacgtcttccgaatgaaaagggaacccggtgaaaatccgggacagtacccgctgctgtgagtccacaaaaacggacatcgaacttttgccactggtgtaataccgggaaggcacgatgaccgggacgagtcagaagacctgccatgactggaatgagatttacacctgcgggatatacgggtcgtaatcaaataaggaatagctcattggccattcaatatttgaagacagacatattcccgttcgtgtaagttcgcacgaacgttttttttgtgtttgttaataatatgtttacattaaaatgagtgacctatgaaaagaaaattacgctttctggcaggtgcctgtctatttaccgcaaccgccttgttctccggctgtagctcggacgatgactttttgatggaaccggttgattccggaacttcgcaaacccgtgctgtgacaaatccggacggtactttaactgtcactttcgatgatttcaatcccggcatgttggcaggacctacctcggccggagaaaatctttattcgtaccaagggtatcctcaagtaaccaccatttatgacaatactccggaagaatatctctttctttcaatgtttaatacagtaggtggaagcacagagtattccagcggcggcatcgcactttccaactggaacatccgctccaatcaatcggggaataccggagactggtggtattcctatctgaaccagtgttctgtctataacactgcggtggaagcggaaggacaggataaggaagccgggcatagcggctccaatttcggtgtcgtttacggatatgtggatgcttacaatcaggcatggatggctaaaccaaaattttatttcaatgttccccggaaattggtcggcctgtggatctgcaacacctcatacacttatggtgtcatcacttatggtaatcagttcggtcctacgggggtagcgactcctctgaaagagatgaaagggtatttccaagtgaatctggagtgttatgatgcggatggcggtctgatccgcacttacaaacgccttttagccgattatcgtgacggccaacaacaggttgatcctatcacgacatgggattattgggaaatcaatgccgaagaggtgcaaagtgtgaaattcaacttcgagggttcggattcgggagcatacggtttgaatactccggcttatatctgtatcgatgatatcaccatacaataaaaagaatacagggatatcccttctgtcggggtatccctgttatttttctaaaatccacacattatgcatcgtttttactattttattatttttgcctgtatgctgtttacctcctgcaacaaggatgaagtcattaccgaagaagtaggaggacaacctataatagaacttgacagcgagaccggcatttacacggtcaaggtcggtcatgaattgactatcgccccgacataccagaatgttgaagatgctctttttgcttggacgatagacggtacgctggtttcttcgggtccgtctcttcaacgtacatggaatgaatgcggggatttttacgtcaaactaagagtagacaatgcggtaagctatgccgaagaggaactgaaagtagaagtgaaagaactcacccctccggttatctcactggcacttccttcgcagggattaaaagtcgtccggaataccgattacacatttactcccgatattcagcattcggatgtagaagggttcaaaatcgaatgggtacgggaaggaaaaatcgtttccaccgagaatacttataccttcaatgaaaaagaactcggtgtttatacggtgacaatcaacgcttccaatatagatgggacaacaacaaaggacgtaagcgtagaggtcgtggaaacgatgccctacgttgtcaaattcccgaccccgtcttaccagcaaacatccacggacaggtacacttttgccgaccgtcctgttttcctgcgcccattgttggagtatttcgataatccccgttttgagtggagtgtggacggtcaggtcatggaaggagaagtggaacgcatgttcaagttcacgccgtccgcacccggagaatacaccgtctcctgtactgttttggaagacacaccgacggaaaaaataagtaggaatatcgacaaaggaaagacggctgtcactgccactgtaaaagtcgtctgtgtggacaaaaaagagcaggacggattcttggcttcgggaagttccaagctctggaataaagtctatgaatataccccggctcccggccaatttatcaacgaaacgagcacgataggcggtatgaccggcaatgagacatcccctgaagcggctgtcgcatgggcaacacagcgtctaaaagacaaactgcacgtctctttaggttctttcggcggttatatcatcgtcggtttcgaccacagtattcccaattcgggtaaccaatatgatttctgtgttcaggggaacgcctttgacggaagttccgaaccgggtatcgtatgggtcatgcaggatataaacggaaacggattgccggatgacgagtggtacgaactgaaaggatctgaagcaggcaaggaagaaacaatacagaattttgaagtgacctattaccgtccggaaggcaaaaaaatggatgtccaatggatcagttccgacggtagaaacggctgggtagactatctgtccgcttatcatacacaggactattattatccggcttggatttcggaaaacagttataccctgacaggcacttgtttggccgcccgcaacacccaagattcacaaaccggttattgggataatcagagttatgactgggggtatgtggataattttggaaacgaccagatagaaggcggcagtacggtagatggaagcgggcaaaggaacggtttcaaaatttccaatgccatccatgccgatggaacggaagccaatctgcaatatattgattttatcaaagtgcaatgcggtgtcttggccaaaagcggctggttgggcgaagtttcaacggaagtattttcttttgaggatttaacaaaataacaataaatacaagtatgaaaaattattttcttcccatgctcctatccttgttctttttgggagcatgtgacaaaaacgatgaaattatacctgaagatgcagatgagaatttcatcacgtcagttgtgatgactgtggacggaaaatcgtacacggccgatattacggacaatacagtaacgataaccgttccttatacggtatcgttgaacaatgccgaagtggaattcaagtacaccacttctgcaacaatcatacctaatccaaaaacggtaacggactgggataacgaacggaccttccgggtgacatcctataacggagatgcccgcgaatatgcctataaggtggtgaaaagcgaaatagaatctgatggagatgtagagttgaagaccaccgaggaggtagcttcttttgccgcaaccaaaacaaccgttgtcaaagggaacctgattatcggttctgatgcggaagaggcagaaaaaatcactgacatatctgcattggcatctttgaaagaggttacaggcaacattgtcattcgtaacagttacaacggtgcagacttgacagggttggataatatcgtttcagccggaggtttgcagttaggttcggtcgatgtcgcctcgaaagctacggagcttcacatgatttccatgaaagctctggaaatgctctccggagacatatcggtatataacgaccaagtgacttatgtcctattcgagaaactggcaactattgaaggaagcgtgatgttcaatgcgccgtcgttacagagttttgagtttccggttctgaccactgtaggtcaggatctgaatatccagggactcaatgaagaaaacaaggcagccggaacaatcgcttctttagaattatcggaactgacaagtgtcggaggtgtcttgtccgtgaacaatcttgccaaactgacttccatgagcttccttaagctgaaagagaccggtggctttgatttccacaccgtccccgtgatgttggaaaccattaatctaccggaagtcgagacagtaaacggaagtattattatggaagccaacatggaaactcctcctaccggtagttttgttccccaacgaaatgacgtgcttcaggctttcggtggaatggacaaactgacaacggtgaaggggcagataaagataaaaaatttcacggcgctcaagcagcttcctgactggagtaaaatcaccacacttggaagcattacgttggattatcttgaagacgtgagcggaacactgatgttgccgaacgcccgatttgaaaccttcggagaaacagctccccagattgaaattataaacaaggtgcagctctccaaaattgaaacagccgaagatttgtcaaatgtaaattttgtcatcaccagtcttacgaataacaagttccctgaaatcatgttcaagaatatcaaagacttcacttgtaagccaaccactaacaatcccgattataccatatcgacaattcaacatgtacatggaaatctgtatgtgacaggccaaatgcgaagcaaggcaaaattccctgacttggaaatcgtagacggatatggatacatccaaatgcctatgatggggactgtttcaatgcctgtattgaaagaggtgggtggacaattttatttgtccggcaatctaaccagttgtgagttgcctttgttatccaaaatctgttgctcagcctctcctgtatattataaagagggaaaaggttctttagcaatgactttacaaagtaaatcactgaatcttccggaattgcttcacgtaggaggtgaagggttgttcgttaatcaagcaacaggtattacttgtgctaagttacagacaatagatggtacgttacagataaaacaagcgaaatctctttctcaggaaacattttccatggagaagttgaagaccttgcatggggttgtttttgacggtttgacaaaattcaccgactacactttcttcggtaagttcatagaaaacggaatgattacggaggaaagctggagtgtgacgaaatgtgggtataacccaaccttccaaaaaatgagggacaaacaatatacgcagcaggattaaaccttataccttaaccagagtacccgtaatgattcgggtactcttttttatctgaatgacaatgagcagaacaatacaacggatttgcctttttcttttctgcctgccagttttcggcagttgcatgaaatgggattatggggagatggagaatttctcggcatcggcttccggtcttttcatcaccaacgagggaaatttccagtacggcaatgcctcgctttcctactatgatcctgccacgtgcgaagtggagaatgaagtgttttaccgtgccaacgggttcaagttgggcgatgtggcccaatctatggttatccgggacggtataggctgggtcgtggtgaacaactcgcatgtgattttcgccatcgacatcaatactttcaaggaagtgggccgtatcacaggtttcacctcaccccggtatatccatttcctgtcggatgagaaagcctatgtgacgcaaatatgggactaccgcatcttcatcatcaaccccaagacatacgagattaccggctatatcgaatgtccagacatggacatggaatcgggttccaccgaacaaatggtgcaatacggcaagtacgtctatgtgaactgctggtcgtaccagaaccgcatcctgaaaatcgacacggagacggacaaggtcgtggacgaactgaccatcggcatacagcctacttcgctggtcatggacaaatacaacaagatgtggaccatcacggatggcggttacgagggcagcccatacggctacgaggcaccgtctctctaccgtatagacaccgagactttcaccgtagagaaacagttcaagttcaagctgggcgactggccttcggaagtccagctcaacggtacacgggatacgctttactggatcaataacgatatttggcgaatgccggtggaagccgaccgtgttcccgtccgaccttttctggagtttcgggacaccaaatactacggccttacggtcaatcccaacaacggggaagtatatgtggccgacgctattgattaccagcagcaaggtatcgtgtatcgctattcgccgcaaggtaagctgatcgatgaattttacgtgggaatcattccgggagctttctgctggaaataacgaggaaggaggacaaaaatgaaaagacatcttattctattgttcgtgggggtaagcctgccctttctgcttgccgcccagcaaaaaaattccgtcagcattaccaaaagggtgctgcgtattccggaggttacggtggtaggcaaacgaccgatgaaggatataggcgtgcaacgaacccgtttcgattccatcgccatgaaagagaacatcgccttatctatggccgatgtgctgacattcaactcatccgtttttgtcaagaactacggacgcgccacgttatctactgtagctttccggggtacctctccctcgcatactcaagtgacgtggaatggtatgcgcatcaacaacccgatgctgggcatgacagatttttccaccatcccttcttactttatcgatgatgcctcgctgctgcacggaacttcgtcggtaaacgaaacgggcggcggcttgggtggtctggtcaggctctccacttctccggccaaccatgaaggattcgggttgcagtacgtgcagggagtggggtcgttcagcacgttcgacgagtttctccgcctgacctacggtaacaaacactggcagtcctccacccgtgtggtatattcctcttctcccaacgactacaaataccgaaaccgggacaagaaggaaaacatctatgacgaggacaagaacatcatcggttcctattatccgacggagcgcaaccgcagcggggcttataaggatctgcacattttgcaggaaatttattataacacgggcgaaggtgacaagttcgggctaaacgcctggtatatcaattccaaccgggaactggcgatgctcaccacggattacgggaacggcatggacttcgagaaccgccaaagggagcagacgtttcgcagcgtcctctcgtgggaacgcgtgcgggagaaatggaaggtcggtgtaaaaggtggctatatacacacatggatggcctatgattacaggcgggacaagggaaacggcgaaatggcttcgatgacccgctcgcgcagtaagattaacacgttctacggaagtgcggacggggattatgcaccttcagagaaatggctgttcacggccggtgtttccgtacaccaacatttggtggaaagcgcggacaaaaatatcatctcgcaggaaggtaacaaggctgttgtcgggtatgacaagggacgtgtcgagttttccggttccgtttctgcgaaatggcggcctgtcgatcgttttgccgcctcgcttgttcttcgcgaggatatgttcggtacggaatgggccccggttatcccggctttcttcatcgacggggtactgtcgaagaaaggcaatatcgtggcgaaagcatccatctcccgaaactaccgtttccccacgctgaacgatctctattttctgccgggcggtaatcccgacctaaaaagcgagcacggcttcacatacgacgtggggttgtcattctcggtggggaaagaaaatgtatatgctttgagcggtggtatcaactggttcgattcgcacatcgacgactggatcatctggctacccacaaccaagggattcttctctcccagaaacctcaagaaggtacatgcttacggggcagagaccaacgcccaccttgatgtaatgctcggaagggaatggaaactggatatgaacggaactttctcgtggactccctcgatcaacgagagcgaacctatgagtccggcagaccaatccgtcggcaaacagttgccatacgtaccggagttttccgcagcggtgaccggatgtctgtcatggcggacatggagcctgctctacaagtggtgttattacagccagcgttataccatgtcgagtaatgattataccctgacgggctatctgcctccttacttcatgaataacgtgacactggaaaaacagctctcttttcgatgggccgacctgtcgctaaagggcagcatcaacaacctgttcgatgaagaatacctttccgtattgtcccgtcccatgccgggcatcaatttcgagatattcatcggcataacgcccaagttcggaaaaaacaaaaatagtaaacgataatctgcatcaatatgaacgcattaaagaatttaagcctgattctgttgctttctctggcatttacaggctgccacaacaaaagttcaaaactcaatgatttcaacctgctgctttatgctcccgaatatgcctccggcttcgacatcaaaggggcggacgggaaggaaagcgtactgataaccgtcaggaatccctggcagggagcagacagcgtaaccacatggctgtttatcgtccgcaacggcgaagaggttcccgaagggtttgccggacaggtactcgaaggagacgccaaacgcatcgtggcgatgtcttccactcatatcgccatgcttgacgcgatcggtgaagtccagcgcataaccggcgtttcgggaatcgactacatttccaaccccgacatccaagctcgccacgacagtattggtgacatcggctatgaaggaaacatcaactacgagttgctgctctcgctcgatcccgacctcgttctgctctatggggtgaacggcgcaagcgcaatggaaagcaaactcgaagaactcgacataccgttcatgtatgtcggcgattatctcgaagagtcgcctctcggtaaggctgaatggatggtagtgctttctgaagtcacagggaaacgtgagaagggtgaaaaagcctttgccgcaatcccggtcagatacaacactttgaaaaagaaagtggccgacagtatccttggcactccttcggttatgcttaatgtcccttatggagactcgtggttcatgccttcaacccaaagttatgtcgcccgcttgattgccgatgcaggcggtcgctatatctaccagaagaacacgggaaacgcttctatccccgttgacttggaagaagcatacctactcgcgtcggatgcggacatgtggctgaacgtgggaatggcgaactcccttgacgaattgaaggcatcatgtccgaaattcaccgatacccgatgtttcaaaaatggagaggtgtataataacaacgcccgtatcaacacagccgggggtaacgactattacgagtctgctgtcgtgaatcctgacatcgtgctccgcgaccttgtgaagatattccatcccgaactggcgcaggaagagtgtgtgtattacaagcaactgaaatagatgcgttcccgttcgactatattgtcctccatattgattacgctcacggtcggtctttttttactggacttggccgtgggagctgtcaatattccaatccgcgatgtatgggcagcgctgactgggggagattgtccccgtgccacggaaaagatcgtactcaacatacgcctcataaaagctatagtggcactgttggccggggctgccttatcagtcagcggtcttcagatgcagaccctcttccgtaatcctcttgccggtccctatgtcctcggtatcagttccggtgcaagtctcggtgtggcactcgtggtacttgctgggctcggttcatcaataggcattgccggagctgcatgggtgggtgcggctgtcgtattgctcgtgataactgccgttggacagcgaataaaagacatcatggtaatcctgattctgggtatgatgttctcatcgggcgtaggcgctgtcgtgcagattttgcagtatatagccaatgacgagtctctaaaaatgtttgtgatatggacgatgggagcattaggggatgtgacagcgcaacaacttgccatctttgttccatcagtattagtcgggttgttattggctgtaataacaatcaagtcgcttaatcttttgttgtttggagaagagtatgccataacgatgggactgaatattcagcgttcacgcggcctattgtttctctcgacaacgctgctcgccggaacgataaccgctttttgcggtccgataggtttcataggtctcgctatgcctcatgtcacaagaatgcttttccaaaatagcgatcatcgtgtccttctacccggaacaattctttcaggagcatcgatattgcttctttgcgacgtcatttccaaaatattcaccttgccgatcaacgccattacagctctattgggaatcccaatcgtcgtatgggtggttttacgcaacaaatccatcaccgcatgatagaattacagcatttttccataggttacaaagagaactcgttgctccacgaggtaaatgccacgataaaaaaaggtcaattgacagcccttatcggaagaaacgggacagggaaatcgacgctactccgcgccatagccggtctgaaccggtgttattccggaaaaatcattctcgacgggcacgacatcgcctgcatgagaaccgaagatatggcaaaaacgctggccgtcgtcacgaccgagcgcacgcgcatcgccaacctgcggtgcaaagatgtcgtagccataggccgtgctccttataccaactggataggcaggatgcaagaggcggataaggagatagtcatgcaatcgctcatctcggtgggaatggaggcttatgcaaaccgcacgatggataaaatgtcggatggcgaatgccagcgtgtgatgattgctcgtgcattggcacaggatactcctatcattctccttgatgaaccgacttcctttcttgacatgcctaatcgctacgaacttgtggcgttgcttcgtaggcttgtccacgacgagaaaaaatgtatcatgttctcgacacatgaacttgacatcgcgttgtccatgtgcgattcgatagcattgttagataccctgaatttaaactgcttgaccgcgtctgaaatgcggaaaagcggatacattgacagacttttccaaaatgagaacattcgttttgactccttatgcggtacaatgattttgaaacaatgagtacatacactgtagaaaattttacttcagacatcactgttgaaggatatatcgccgaattccgtgacgaaccacattttcttgaactttgcaaacaatgtaccaattatggcaaaagttgggggtgtcctccatttgattttgatacggaatcgtttctccggcaatacaagtatgcacatcttatggcaacgaagataatccctgaagacaaagatattccgattgaatatacacaaaaactcattttaccggaacgaatacgaatcgagagcgaattattggatatggaacggaaatatggagggcgttcatttgcctatataggtaaatgtcttcactgccccaataacgagtgtacgcgtaactgcggcacaccatgccgacacccggaaaaagtgcgtccgtcactcgaagccttcggatttgacatagccaaaacgcttgctgaactttttaacatcgaacttctttggggaaaggatggcaaattacctgaataccttgttctcgtaagcggattttttcataatgaatacgaactttgcaacatagcatactaatgattcggacatgaaacaaacagacaaactaaccacattcggttcaatctgttttgtgatttcaaatgaattatagttagatatgtaaaaagcgacgccggagcttgaaataagtaacgatttatcggtgtatcctccgttaaaccgttcattttcggttaaacgaaaacacaacatgctgtccgctggagcggagcacgtttcttcaataattattgtgtatcataccgttgtgtggctattttcctgtggtttgtggggcttttccatcagatatttgccggctgttctcctcattaaaggatagatatatctccatgaccatgcgacttacgcccataattcggggataaggaggcgaatatacggaaaatctgccctttacatgccctattgtccattaatggattaatacttctacacatctgcaaatggagaatgacaggtctcgttttttaatttaatatcttacttgaaaagaaatataagatataccattcccctgattaaattcagttttttttctgtgttatattacttgtaaaattctattataccattcaagcaacagcccttgaatcccgccgtatttcaattctctttttcccatataacgattttcccatttttatttatcccgtcagtagctccaccttgccgggttcagggtgcgaagctacggacgggacccctaaaaatctgcaaggccgcttcgcgccctgcgggttttggcgaaaatttttcaatccgtccagccgggcggttgaaaatttttcaccaaaagccttgcatattttctccccgtccgtatctgccccctgaaacgagcaaggtgaagccaccgacaaggcataaaaaaaaagtcaatgttatgaaaaagagaattgaaatacggcaggattggaaacgaggcttcggctccgctccaaccggcattaaaaattgggtgaagtggtcgctggtcggtttcgtggtctatgtggcggtgcgtttcgtgtgtgccttttggggtggtattctgcccatgttggcagttttggcggtggtggttttcctcatccgtgccgtgtggtgcatcctttgcgtgctcgctcttttcatccttgcgctttgcgtgatactctgacagaatatgaatcattttaaaatcaaatcattatgaacaaagtacatttattgggagccaacagaagttacgacagagacgttcagaccgtttcagtcaaccaagtggtagtattggatagctatgacagctatgttgtgtatgaagtaacccgtgacaagtggggaataacctatcatcttgtcaatttgcggacatacgagtttcatacatccgaccttatccggccgttatcggaaaaattcggaataggaatctattacgatgatgcgaaccccaagtttttagatccgttggaaacagccgctttactcaccaaggcaaaagagaagaaagccgaagaagaaaagaaagcgaaggaaacaagagaggaatacggacgtatcgccaaaatcggtgcggagcgtttgcgcccccttgtcccgacggatgcaaaggcggtcattatcggcacgttacgggtaaacgagtgcgacagctatacggactattatgactacagtatagcaagaaccgtcattttaggcttttccaaacatacacgcaacctcttttcagaaatgcgcaagcatgccgccaattttgagggaacagcctatttggcggaatataacgcagattacgaacaccgggaaaattacagcatgggagacggtatgtatctgggcaggaacaagtacagcggttggacggttgagaaagagcctatccacgaccttgaaaaattcatagaacggtatgcgcacaccgcaggggatgaagccaacctttgtatgaaagcaccgcagacggacagcgatacggcagaacaatccacagcaaccgcagacttttcaaccctcagtcttgaaatcgtggaatacagcgagaaggcgattgccgtattcggtgacaccaggccgataaaggacattctgaaagacctgaacggtctgttccgtgcgaacctcacctataagggcgaaaggcgtgcagggtggatatattccaagaagcaggaaacgaaagtaagggaagcactcgccacgtgcatccgtgtatgacagcatgaacggcagggcggaacaatccgcccgcctatcaacgaacccataaaaaagtaacgacatgagaacggaaacaagaacatacaccctctatcggataaccgagttatccgaggaagccaaagagaaagcacacaccgaatggttgtacaaccgatatttttacggttggacacacgagaaccgtcagacccttaataccttttgcgaacgcttcggcattgtgtgccgtaattggagatatgacgcatgcaattacagctatgactaccgcagcaggcaggaagactgcatagacaggctaaacggttggcggttggcggcctatctgatgaacaaccattggaacgacctatacacgccaaaatatttttggaaagggacgaaaggacgaaaaagcaggatatttgtagatgcctgttgtccccttacgggctattatatagataactgtattcttgatccgatttatcagttcttgaaatcccccaccgaaaatatcacgtttgactgccttatgaacgaatgtctcgacagttttttccgtgcttgtcgggatgatatggaaagcacccggactttggaacacttcacggaagaaagcaacgccaacggttgggaatacctttcagacggaaaaccattcaattaattatcaacatttaaaacttatcattatgaagacgaacaagaaagtacagacgaacagcgtacagaaatcagagaaagaaaatgcagtaaaggtgaccgctttggcaatcatcccgaaaccgatgacactactcacaccgcaggacgtgcccacggctaccgaagtgacagaagcacccgaaacggcaaccattcccaccgttacggaagaagcatcgcagcaggccactttcaagacaccgcttgcaacggccacagccgaaacagaccttgacatcactaccatacacccaagcacggacaaccaccgcaagacgttcaatgacgcatcattgcaggaacttgcggaaagcattcgggaagtaggaatcctgcaggccattgcagtacgcccacgcacggaaggcggttatgaaattatatacggtgaacgccgttaccgtgcctcattgcttgcaggagcaaagaccataaaggcaaccatatataacaatgtgacggacgatgaagcggaagacatgtcgttaagcgagaacttgcagcgtgagcaggtacgccccactgaagaagcaaaagcgttcaagcggttgcttgaaaagggcagatatgacatgtattcactgaccgcccgtttcggacggagcgagaaatatatctatacccgattgaaactgaacgaactctatgcgcctgtcggtgaactgttggacaatgaaacaatcactgtcagcgtagccgaggagataagcacctatgagcccgatatacaaaaggacgtgtacgagaagcacctcaaagaggggaacggtgaggattggacgggatatacattgaacctcttcaaaaggtactttgaaaaatactataccaccgaccttgggcaatacaagttcgacaagacggaatgcaatacatgcgtacacaacgcagccaattacaacctttttgccgagcataacgggtgcggacactgcaccaaccgcaaatgtctggaggccaagaacgcagcccatgtggcaaaagagacggagaaacttttgaaatccgatccgaagctggttgtcgcacgcccctactacggaagccgtaacgatatggcactacagaaattggacaagaaagggcatgaaatcaaggaacttgactacaacgtatcggcaagggaattccccaaagcacccgaagcaccgaagaaagagcagttcacccaaacgaaagagtacgaacaggcggtgcagacatttgagcgcagaaacgaggaatatgcccgaaaggtggaggaacttgaccgcatgaaggaggaaggcaggataaagacctatgtaaaggtgggacagacagaacccgaactctgctacgtggagataaacagaaaggaaaccgcccccgtcactatcgggacattgcaggaaagggacaagcgtttcaaacagctttccatcgaaaagaccgttgccgatacgaaaaagattgtccgtgagaacgactatcccgaaagctcgttcacgcagtacgaagacggtatggtttattttgccatgcttgcccaacttcaaaggagacatttcccgcttttcggcatcaaggaccagcctttcgcattggacgagaaacagcggatgaaaatcgttgccaaactgacggacacacaaaaaacggtaatcaaacgggacttcatcagccacttcctttgtgagaacggccacggagacaacaacgcatccaagctgctgagggacttcgcaaacatgcacttccccgaccaatacggacttgtcaaagccacccacgaggaagaatatcagaaacggcatgaacgtttggaggaaaggataaaggaaatgaagaaagcggaaaagaaagctgccagggaagccgaaaaacagcagacgacagaaaagacggaaaagaagaccaccgccccgaaaacagagaagcccgaaagcggaaaagccgcctgacaccaagcggaaagcatgtgccggaaacaatatccggcacatctttttcaccgccccaagagaacagagggcagggccggacgaccccacccacaccgccaccgtaaaaccttttaaaatatttgcgaatgaaatatataagaatgttcccggacgtggagtattccaccgacagggattttttccttgaaaatcagattgtctgcattgtaagcagggagggcacgaagttttgcagcctgatagaaaaccgtctgttcatgcgttcccaaagccgccatatcagcaagcggatgcagctgcatatcatgtgtgaaatccacaaggaaatctgccgccttcgctatggcggcgagccggtggaatgacctgccacaccccacacctgaatacttcctctcaaaaaagtcgggcaatccctatgcggttgcccggcttttttctatttttgcagggttgaatcaaaaaaagaaggttataagattaaagaatttgaatgataacatattagaatagcttttagctgtttattcccgaacacgaaacgaccaattttaatgcaggagaataaacgagcggagtccttgtcatatccattggcacggacttaactcgtctcctgcgaggcgcttggtcgtgcctgtgttcggacttgttaagttccgtgcttttttcggtacttaacagtaattacggacaaggcattaacaaaaaaactcatggaaatatgtatgacaggaatgttgccgttacaggctgtaccattgaaaagacaagccgatacgaccggttcagggaaaacaatatccgtatggaactctaccgtattattcttgcactttatgatgaaggataccgcatgttttcctgcaatctgaatacctatatcggattattggcggcagatacggccatcatactccgtgaagcggacaaatgcccggagatacatctttcagccgtcatcaccggtacatgctatccggcagataccgacaaagtgtattgcgccttatatgatgacctgataaagaaggcggacagcaaggagacgctttcagagaaagacagcctcaccggtgcgcttgccgcaagccatatcatctgttattacgaggacttttctttggaaatgcagcggatacgcatgtccgccactccttgtaccaatatccgcaaaatgatataggcatctattctttatcgcaggttacaacaacttttccagccggacaatccgtttttcggttgatggatgcgtgctcatgatatattcggtgaacgaaggccgctccccacccgtttccgccacctccagccgacgcaggaacgagagcaggccctccccacaaccgtaacgtaccgcatacgtgtcgcaacggtattcggcatatttgttgatattcacgtctgctatccgactgataccgtaaatcgtatgatgcaacagtttataaaggctccaccagagtctggccatccccaccacggcgaaacggacagccgggaccacggcgattatcagattgcctgccaatccgaaaaacagggccggaatcaggaacagcccgtacaggcagcggtagcccagcaactgcatagagaaaagaagcacctgatagacaaaatcataatgcgagatgtgtcccacctcatggctgattacccctttgagttcctcgtccgatgccgtctgaagaataccacctgtcagcccgattgtatggaacccgaaagtcacggcattcgtacgtgcgtccctgttgcagtagatattcagcttcctctccatccccatttccgagagcagacgttccatccgcatccgttcctcaccgtccaacggtttgtaaccctctttcatccacatcattcatacgttcaatggtgaaaggttttataatatgtaaacaaaacaataatgaaatacagctgttcgtatgaactgttttttcttagggtatgttccatcttgatttataaaaacaggaaaagatgaagaactgattggctagatatacggtcaattcttcatcattagctccggatgcaattatgcagtatcctttattgtcttttcaaaatataatgttcagccaattcactgccgttgagcgttcccagactgtcggacaacgcgactgaaccatcgagaattttatagaatgtcttcttcccggaagagggagttaccagttctatgatgttttcacccacaatgttataaatgccactttcttcaaagacgccatccttccttcccaaatattcactccgcagttcgtaggttgtatcactgttgattttcagtgttgtcctgataccactgcaatcggcgcagggtaatgtgccctcataagtcccataaaaattcttatttttggtattgactgtagtggtggccatagtagcgctttctttttcctgttgtgtagttctcttctgtgatccggtacagcctgacattgacgttattatggctgttgctaccaataaaagattgaatctgttaaatctcataattccgaatgtttaataaattaaatattataaatctttaaatcaatctgttgtggttatactccttacaagagacctatagccagatagcccctccttcagtatctcccgccttataggtataagttatgaattcctcaagcgcttctttccatgtaaggttgaaggttttcataatggaatgcacggtacggttgctttcttcatcaagactatcttcttcgatttggttaacatctgcatccggttctatgtcaagatattcatcacgactccagaataccactataggaatacttaagttgatatcccatgtgccacgctggatcaatattccggaaggcttgtagaacggatcaaaagtaccagtttccggattggtcttggatttgtaaccgtgataaagacgaattttcaagtcaaattccttacgatctttcaaaaaacggatgacacctttcaacccgacaggattgcttcctcctgttatttcagcctccttgtcatgtctggtcttgtcccaaggggtagtatctacataaagatagtccactaatttttgcggatcattgtcatcagcttccggctgcccgtcaaaggtgggttttacattttctggtgtaaagaaatgttgatgtattttatcctgtccattttctataaactggttattcatcaactctcccttactattgtagtaataaataaacatcagataaataggggctggagtaaagttgtctccatttttatattctccgtttttctgtacgtagaacttgttttgactgccttcggcaagtgtccagccctggccggtcttcagttcgtaggttatttcttgaatacgtttcatgtgtctggctggagattccggattctgatgaggaccaccgactttctgtatttcattccaatctgcatgcaagtggcattccacaagacggattgtcattttggaaggatcttcatgcaatttgttttttgtctcattttcaggaatcacaggatctttgctgcatgaattaaataataaggtaaaagatgcccccatcaggagcattaatgcgattttacatacatttgttttcattttacttgtaattaaataggtttgttgattatgtctcgttataagtcaaaagctccaactcactccgcaacgcacatcgcgccccatgtcgtgcgcatagtaacgcgaacggttggtgtattctttatattctttgttcagaatgttgtctgccgatatcatgaaccgtaatatgtgtccacatcttacgggacattccagatccacatcggctccaaaaagatggtatgccggaggagtgtacgggataagatccgtatccgggtcaaaccgggtctgttttgccacgaaacggtgccggacacccagacgcaaccggaaatgcgaccgggttctgtggttccatgaaagctcatggttgagacggaaaggggggatatagggaagataatttcctgttgtccgttcgtttgcccgtataaaggaggcggtcagatggtaatcccatgaatctgcaggcatgaagtgaaagtcaaaatccattccgcggaagaaagccggggtctgcctgtattggaatataggatatgcccctgaaatgacagtaatgttctctttttggggctcatcatagatataaccgcttatccattgcagataaccgtccgcatggacgctgaacaccttgccactgtaactgatagaggatatccatttatagcttctttcggaattcatgaccgaatcccctctgacaaacattcctgatccgagttcattcccattgctgtacagctcatacacgtggggggccctccaggccatcccgaaattggtggtaagtttccagtgtccggaaaaaaggtgatgggctcccagactgtatgatatgttattgaactttcttgttcccccatagggatttccagtccagtcatagccgctggcacgggtttcctgcccgtcaaagcgaacacccgcttcaactcctcccttgctgtaattatactttccaatgccatatattcctgcctgtgtctccgtgtaattgggaataacaggaacaacacctgtccctgcccggctgtgattgtctatgaacatgatttgtcccccaatctccgtttgccatgaattataattccacttccaccggagggagttttgaaatgaatacaagtgcagggaaacagccgggatgtcggatcccaggcggcggatacgtttttcctgccggtcatccttctgccaggaaccctgccagtaaagatttccaacatcacacatgctgaatcttattttgccaacggctgtctgatgggtgacctcctgatatggatatgtgatacttcgggcgaaagggtccgtatgcaggggacgtcccagccggatacgttccgccagcagatcctcacttcccatctgggcactgagcattacccccatgcggttgtaaaagcggctgtagaacccttctattcttaaacggccatgatcatagccgagtgaagcggaggtatgcaattccctggttccggtattgttaagaagatagttcgcggtagaacggtctcctgaattcgagcaggttccctgtacacgccaggcaatgtcacggagaaaagggaaggttccctccatctgtccggtaaggacaaaacggcgtccgttactgccataaagcatggatccctttccttttaaggactttgtccggaaaggcagggcggcctgttccatgataataatcccccccaaagcctctgaaccgtaccgtaccgcatcggatcctttcaccacctggatggaattgctaccgttcatgtccacttccggagcatgatcggccccccattgctgccctgtctggcgggtgccattgttgatgatcaatatccggttgccatacatcccctggatgacgggtttggctattgccgtccccgtactgatagagcttacaccactgacctgttcgagcagggcacccagggaggtccccaacgcatgattgattgcaggggatgggatttgcccgctcactgcattccgggttattccggaacgttcaccgataatgatgacttcccccaatgtcgtcatttccggagaaagacgtatcgtataggtgttctttcttttaaacacatccttcaaggatatatattgagatttataccccagactctgtacaaggactgtatctgcggaattccttgaaggaatagttaccgttccttcggataagctgacaagcacctgcccgccggctaatacaccggctccttcaatagggtttccgttttccccgtctataatcagcagggtcctggttgtgtctgatcgttgccggtattcctgtgcatgcatatgtgcagaaaatgccatatacagacaggtaaggaacagacacacatatcggaaatatgcatgaaatgtcatattttataaaagcgttataagttgttcaggatagtcaataggcataagagccctttacatgtcatcacatagtgcatgtaatccatagagaattatgacattcggacaggaggagcgcgaagagacaaaaggagaattgtagcagtgacgccctgctcctccaaaataagatatttaacaggctttacagtcaaggtatgggtgtactccaaactttccgcttcggtaaataaggataaagtgaaaagacagatagcacatttatctgctgaatcgtgatgagggaactgttgcccgtcatgaatacatgcacgctccttatgaacatgaaaggctttcacaaaaaagaaaggcatcatgctcagtaacagcaggtatgctacggctgttctatttttcattattccatccatattacaaagatagtggattatacagcttcacacaatacctacaaataggtatttttcgttttttttatatggtcggcaacggcatggaatataaccacagccgtcataagcctaccatacattttatatccgttcatccgggggagacggttgcctcagtaaaataatgccgtttatttgatgaatgttccatttcttaattctctaaaagcttcctccagttcctcccggctattcatcactatgggacctccccagacaataggttctttcaggggaggagccgacaacaaaaggaaacgtgcgccttccggtccggctttcacctctaccggttcgtccgtatcttctccaggaacgggaacagaatataatatggcacaacccttactttccgcagattgctgtctcacttcggggaaaagcgagccttccagcaaatagagaaataggttttcatcatcgcgtgcttcgttgtacttccatgaggcgtcagcgggcaaagttacatccaaatatgttatctgaacatacgaattgtccagagtcccccgtatcccccggtggctgcctgataagatccggacggttgccttgtcggacatcaccaccgggatgtcatccggagcaatgtccctatatgccggtggaaccattttttttgcagcaggtaaattgacccacagttggcatccgagcatcctttctgatggctgcggcatctccttgtggagtattcctgaaccggctgtcatccattggcatcccatggactggatcacccctttgtttcccaggctgtcctcatgctccattgttccgctgacaagataggttatggtctctattccgcgatgtggatgccagggaaatccctttatataatcctgcggattggtggagtcaaaaccgtcaagcatcagaaacgggtcaaagtccaccaccgtctgctctcccaatatccggcgcagatgtacacctgccccgtcaacagtctttcttcctctcacaatccgtgtcacttttctttttttcatattgttgtcattttaatattaattgtttttcaatccatgcaagaatggtttgtagaatataattatcccgaagcggattttctccggaatatataattaagttggtatcgccaaatatttctgatacagatgccgtctgcttttgactatatatccaattcaccctgccttggtgagaattcacagtcgacgacaacatgtacgttatccgagatcatagtcggaatatatttggaacctagttggaagtccgagcatctgatcacaccctggagccgaaaacctgccgtctctttaccggacaccggactttcctttctgccaattaacatcacgtcaaaccgcacctttttagtaattccgtggagagtgagctctccatatatctcccctttatctgtaccgagcatcttcatttccgtacttttaaacaccatcatggggaatctctccacatcaaagaaatcggatgagcgcagatgtttatttctggcttccactcctgtgctcacacttgccgtccggacttccacccggatatccgtattcgtgcaatcaccattcttctgccttacggtaatgtcaaagtctgagaaatatccgctgacaaaggagagccccgcatgcttcacttcaaaaccgatacgggtatgttcgggatcgtcagtccacatgactgtctgcgcattgatactagcggctgtcataaacaataggaacaataaaatatttttcataaactggatatttcaggaaggcggatgttattcttttatacaaaggataacatccgttttcattcttttataactggatgctttttttgtctgttatactatttttctttgagtgtttccacaaaaaaagatccgttatccaacagcccttggaagaaaacaggaacggtttctttgcggttccagtccctttgcagttcacagatatactgggttacggaagtcagccgaactccggcctgctccatccgtctgagggccgtttcatgagccagcctggatgttccgccgacagcgtcaacaatagtatatacttcatagccctccttcaaaagatccaaggctggaaaacagagacagacctctgtccatagcgcacaaaccacaagtttctttctgcccagtgccttgactgcttcctggaactccttgtcttcccatgaattgacagaagtcctgtcaatctcaggctgccccggaagggccttctttatctgggggatagtaggctggttaagaccggtggcaacattcacagtagtcaaaataacagggacattgaaccctttggccacacggcagacattggatatattttccaccagttcccgtctgtccatggaagctatggaatgaacctgtatgggctgataatcgatgactaacaatgcggagttttccggtgttagcaaatgatccgttttgggatctctgataggtttgatactactcattactttatatttttatagttaaacaaattgagatagcggtatgtagacctccatctcgtttattggttgcaaagttagtaagcttatgtctgatttatctgttcttaaaagaacgaaacttagtcaattacaacactttttatgccccgacatctctctgatgataccgatgctattatttcccaacattgacacgtatattatattgtttcgtatatagtttggcttttttgtatatttgatcttttctttgtatcttgctgacctttctcatatccgtcattggatgtcagacttttatccgagcttacagatgaaatggtcattttaggaaaatatatagaaatagtttgtgcttatggagcataccaaagaaacattgtcggccttggtgcgggaaatgcagtcagtcaccgcatacaatagaggagtttatatcctgaatattgagatttttttagacaagtacagtaataagatattgcgtgccggggctttcttttatatactggtggaagccggaacagcagaatttgtagttgactgtcattcttataatgtaggaaagggggacatgcttcttgtcgctccaagaatgtctgtagagttaatgaaaaaaagttccgacttcggtacatgtggtctatgtatggagcctttcttttttgactccctttccataggaaactatgtatacaaacggctttataacaacagtcatacgacatatgtcttacggctggaggacagcgataccgtacatatacgcaaaacgttagacctgatgtcccactaccttacttctgaccatcctgaggaaatggctggttcgctggtcaatttcctgttgctgcaaataacagaaatctttcacagccaaaatgtacatcctgctggaagagtcaggcattccgatgctttgttccgccttttcagaaaattactggctgagaattacaggaaagtacatgatcttcagttctatgcagactcccttaacgtgtctcagacctacctgtcaagagtggtacgccagatttctggaaaaacagtgaacaactatataacggaagcactttatagggatgccagacgtctgctggtttttacagatctgactgtaaaggagattgctgaacaattaggcttttcagaccagtcatccttcgggaaattcttcaagaagaaatcaggaacatcccctgcaaactttcgtgccggatataagaaactccacaatttgtaaaaatggatgctgtatagtatacgcaaaagttggggaaggaaaccagaagaccctgccacgcaaagaaatctcttttgggatattctatggatacggaccggaacatgttgacaagggagagtacattcataattaccgatatttttttttgggggggatataatcagactttccattctaagtgatagtttatgtattctcaagtctattaaagcagacaatatctactatatttgagacatattttgaaaagatctgacttcatccgtatttgcctttcattattttactattttcacaccgctttaatgtgaatatgttaaagtcagtttcctttcatttacattcggcaaactgtatggaagtataaataatattcttccgggccttatatattgaactggtgtggattgaaaagcccattgtcatacagattggtatggatagaagtccgttccaaggagccgggatatcggctggatatatatcaatttgactgtaagcaaaaaagcatgtacatcagaattaaaaatattttaattgtaatgaaacatatattttatcatctgaccgctgttatggtcgttgtggtatggggaatgacttttatttccaccaaggttctaatagttcatggtctgtctgctcaggagattttccttttccgttttttgctggcttatgctgcagtgtgtcctatctctttccatcgtttttttgcccgtaatctgaaagatgagctatatctggtgggtggcggagtattgggtggctccctgttcttctttttacagaacatagctctggggctgacacaggcttcaaatgtatctttcatcatatgtatggccccgttattgacagctgttctgaccgtattgtccgttcggacggaaaaggtctcaagaggcttcatatacggatctattattgctctgttgggtgtaggcttgctgatattcaacggaagtttcattcttcggatatcacctttgggagatttactgactcttctagcttccctgtcatgggcgttttacagtcttgtcattcggagtctcacccgaaaatattctccggctttcatcaccagaaagatatttttctatggcataataacaattcttcccactttcctttttctgccctcattgacaaatcctgctgtattactggacaatgaagtgtggagcaatctcctttttttaggtgtcatagcctcgtctgcctgttatctattgtggaacattgttgtaaaacagctgggaacgatacaggcatccaattatctttatctgaatcctctcgccacaacggtcggagcgactatattcctacatgaggaagtgactcctgttgcggtagtcgggatcgtcttgattctctcgggcgtatatctggctactaaaaactcccacccactcccccaaagtactactttaaaaaagtaaccaaatactcctttttaagtatttttaaatgcctaacgtgcattttccagtttacctcttgcaatattgtacttttcttccatagatacatgaattttcaataaatcatccaataatgtttgtttatccgtcacttcctacctaatcacagtctcacggtcgacaaaagcgaggagcatactaatatccattgcttcaaacttctttctcacctgagctattcctttaaatttctctttctgccaccgagtctctaattgttatttttttcttgttatattcttttttcattattatgctctattgctatacttacaatgagttttgctgtttttcctttattgaaaacatctgagaataggaaaacagatcttttaaaagcaatagaagatgcttgatttgagggacatcaataaattacaaatagactcatatataacaatagcagctatcaatagtcctaatatttataattgctattgttttactaggaatttatgaaaatactttcctttggtgtgctaatcagtgcaatgttaaagtttaataggaatatacagaatatcggtttcatgcccttataaattaaaaacagttgacaaatataaaaagttaatttgaattacctagtggataaatcaaattactgccatacaatcaaatttatggaacaaagaacggcaggatgccccaccattcttatttataatccaccataccgttttccgtatcaaatgtcattgtcagttccctttcctgtccgaaattgtcccggacaaagaatttcagttccgagcgtctggcacttgtcgaacggtaaaagagggtgaatatctgcctgaccggattttccctatccagttccggcacttccgccaacggcctcacttcccggttgacgagtcttacgccttcactgtccgtcacctctcccttgccttccatctggatgtaaccgatttcatactccgccttttcatagtccccttcacggtcaagataaaagcgtatctccaccgtttcacccgtttcaatctgttcttgcagataccatgacgagaggctgaaatcataatcctgccggatgtctatagcatcgttgcaggaaccgaaggccagcaccgcaaagagtgcgcctatacatatatatagtacatttttcatttttaagtttctcctttctcttttcattagttaatgataaggcggactcccagtcctacctgcgtatggaaattacccgcatcggttccgaacagggccctttccttgacttgcagcaggagcatcacccggtcggtcagataagtctcaaaggccgcagtcagcccaccgccatagataaagcagtcaccgtttgtcaccgtcgccccgtcaggaagcagggaggttccccggttgaccgtctcgaaaccgcccaatgccgagagtccgatacgtagacatacattccggcccttgtcccacaatacgggaataaagtaaccgagttcccctgcgaactgcgctttgggtatcgccttattttcataggtgtactcctttatctgataatccaggccatacagccaataggtacggttacggttggtatgtgtaaaggccagcgaggtgaagtagtggcgttcaccgccactcttccataaaaggaaatgattcaccccgcccgtcgtaaactgtatgcccgtctgccccggcaagtcacgctgcgcgtatgcttcacccgcaaggagcgacagtacagcagctgtcaatatgaataatattctttgcatatacattatattatatataggttattatttcaggtgcagctcactgattggttttgccgccacaaggtctgtattctctatgcggaacgactggtgacgggcaccacccttttcgtaaatctccactaccagcagcttgtcatccggcagtgtcagcttgggcaacacgaagatgttgcgtaccgtggccttaccgtccaccgttgtcagacggttgtaagtccttaccggctctataatattctcctgcatggccgtgcgcctggtcaccttcttgtcgaccaccttgaaacggatatggtctatgtcgaacgatatgtccgaagtgttgcgcagggaagtatgcaggtacagcaggtcattgttgatatagattcctttgagcagggtctgtataccgtacttcttgcagccgatatgcctgatgtcccttttgttcttcttatacagcgtgtacatgatgcggttcaccaccagcggtgtctccccgccgagttccttcagtttcacgaacatgcgatcgtcagccgccccgcccatcgggttcttccgcagccagtcttccatctcaatggaaagttgtgccggttcattcttatataccacattaaaggaatagaagcagccgtcagccgtaatgaccgagaagttcgtctcgccctcaaagccctttacggcagacttgatacgtaccacattctccgcccccgtagctttgtcggcaatgatgtcgtaggagcccaaatccacatatttcacttccgaagggaacaggatatgtacggtcttcgagaaagtcacctcgatgaggtgcggtgcgataatctgattggtggggaaaatccttgtttccacggattcctgcgcctttaccgacaatacggtcaaaagcattactaatgataaaataattcttgtcttcatctgattactgtttttttgagattaatagaagttgataatttgctttcacgaccaccttcacctcacgcatctttgtggccaggtattgcgacccgccgccaagcacgccccttgtcacgtccatgaccagttgctgcgaggcactgcgtgcgaatgagatgcttgtcccgaaactgcccccgatattggcggcggcttccttcatggcggtacgttccgctgtgttcgggacgaaaagcccttcctgcccgtccatatcgtaagccaccagttccaccggcaagatattgccgccgctctctatggagtttaccgtgaccgccatccgttgcccctcgatacgcaccgtgccatatagcggagtattggcaggcacaggcacgccgcccacttgcagcggttccagcagccggaacttcagtcatgccccggtggtcaccgtctggtcttcagccacgcaggcacgtatcgtattggttccggcaggctgtccggcacctaccgccgtggcaaaaccgtaattgcggggtatcgtgtcgggagccgatggcgcagccagcgacgagaccacgctttccgtggcacgtccggcggctatggcggcagggttgccggacggaccgcccgactgtatgcttttcacctgcccgcccgcctgaccgggaaaatagcgtgccgccatctcatacgacttttccatcagttccagcggatcttgtcccttccgttcccgttccagcttttcattaagctccttcacctgccgttccagatcgcttaccctgggattgtctttcggttcctgatagaacgaggctatctgtcttgatatttgttgttgctgttgccgtgactcccggatagcgtcctgttccggtgccgccttttccggcttcagcccgtccgacgtgtccggtatcaggtaatcgcccgctatgtcctgcaaggttcttaccttttcctgcctgcgcttcttcatccgctccagttcgtaagccttctgtttgtcggtcatcgtttccggtgcgatagcgtcgggtatcgttgtattgatgccagccgtcccttccaccgtttccgttgtgtccggcttgaagataaaccagatgaacccggcgcaaagcagggacagaacagccgccacgccatagaatttcagcttgtcggcagccttgcggcttaactgtttccccttttcgggtacggactccgctttccgcatttccttatccttttctttcttatcggattgtgtcattggatatattgttttttaatggttggatactgtccgtctggggaaacgcaatcctttggagatgccgtacctcaatcggaaatttgtctgttccgcagaaaccgcccacgatgcaggcaaggtcgatggcggcgaagagtccgagcaggtaaaggatgataaccttttgctgccggcagctcaaccgcagccagcgtctgcggagtccggccatatggcggtctatccccgttctgaacgggtggaagaccttttttatccccttatctttcatactgtccgatgtccctgttttcgatgatggtaaaactctctatcagaaagccctgcgggttgttgtcactccgggtgacgttcctcagacggcaggtggtgacaagcgacctttcggtaacgctgctcgaacggatgatgtgctgccggcaataagccttcatccggtagggataactgtcgaagtttccccttatgctgtccaccgtcagtgtctgcgagatgtttcccgctatcatccggttgaaatagcctttttcctgcaagttccggtagtagccgatggcgctttcatccgaaaggtaaagggcacgctgcacattgctttcaatggcgctcttgtccggtgacagggagaagaacagctcgtggaaacgcctgatatgttccctcgcttccaccggacggttctgctgcacgtcctgcgaaagggccagcatcagtgattttccgccgtccaacacatagattttctgtcgctgcgcctcggcgaaatcataagcctttcatacggcaaataccgttactagcgtacacgcccccaggaatatcatcccgaacagccgtagctgccggaacgatgtctcgatgttttttaatgatttgaattccattttcttcttctgtttttaatgttgtcgttatacaattattgatgtaaggttagaacattttcctgatacgtccggctatcgctccgcctgctgcaccacctaccgccgcagcaccgttaccggccatctttccggcaccgtttgccttctgcccgtaagctccggcaccgcccgcctggataatccacgatgaaacggtggggacacagaagtaaccgatgatacctataatcatgaaaatacaatatactttccccgacgagtccggtatgaatgccgggtcctgcatattctctatgtcctgctgtaacatcagtatctgtatgcgtgagaggaccgctccgaacaggtcactcaccggcagccacagatagatgcagatataccgggacagccaggtggtcagcgtgctctggaatccgtcatagacggccagcgcgaaggagacaggtcccaggatggacagtacgatcaggaagaaggtcctcagcgtgtctatcagcagcgaggccgcctggaagaagagttccagcagttcgcggaaccatccccggattttctcgccgagttcgtatatcttcttctgtccgtacatgtttatcatcgtgtccatgtcccccagcgaccagcccagttcgtccagcctcttgtcatacgcctcgtcgctcaccaggaaggccttcgccgggtcacgcagcatcgcctcgcgtttcagcctgtctttctcttcctggtatttcctcatgtcgaaggtctgctgttcgaccagtgaggaagtcgctttgcatacgggagaaagaatcccgttgattgtacccagtaccatagtcggaaaaaacatgatgcaaaggcccagcacgaagggccggaacagggggaacacgtctatcggctcggcccgggcaagggactgccatacccggtaggccacatagaacaaggcaccgaggcccgccactcccttcgctaccgaagccatgtcttcacacagcggcatcatttcatcatacagcgagcgcagaagctcgtgaaggtttgtccagtctattgataataataacatagtcttcttgatttaacggatgaatgattaccagtaacgctgctcgtgtgtcccgtacagggagagcacccgtgcggcatcccccttttccttgctccgcaggtacgacacgccgatgttcttgcgggtatagtaccatgtcaggttcttgtattccagcacctcgccgtatatccggttgatgatgtccagccgttccttgtccgtcatcgagagtccggttgccgtggtcacttccttcaagtccagcagcaggtcgctgctttccttgagcagtctgttgtacccgaaagcgatggccgatagctcttccaccgtaaagttggggtcgcccgtcatcgtgttgaagttcgtcacgtagatgtcgctgatgtcacccaccagaaggatggtctgctgcaccttgcgagcgccctttaccaggtcatgcaccgacttcaagggtaggctaagcatccaacgccctgccgtattactacggtgggttttcggaagctcgcccccaaaccggacgtacacgtctccgcgtatccggctttctactaataatatcaatctattcattgttactgagttttttgtaacacttaccacatatggcaatagtctttcgtttgcgagccatcatttgtttttcgcaggtagttttcccttgaagattttttaattttctcacatggtgcatcactaacttatcgactactccacataattcacatttttccgctttcagcctatctataagacttgtgtttgtaggatgatatgtgaatttgggcaagttgtctaaatccttaatgttcattggatttttctttttgaacccaccatgataaaaggtcaagtctttggcagtaccgttctttaaatagtatctaactgaaaaaagtccattcttggtgtacttttttcggatttgcgacatcgttgtccgatatttctgcgcaaatgttttgtacatactatatttcatgatatacccaagttttgacagactactacaattattagccaaacaatagtaattgtaaatgccctttatttccttgttgtacctgtcaagtatctcaaagtcattgttgtttgaaagtttgggacgggattttgctttccaatactccttgccgttgtgtatctttatttctaaaacacgatattcgagcaactttttcttaaacgtatcctttccaagtgccaattgtatcctcttattgaagacacgtcttagtactccgtatttgcttcttttggtgtcattggatttccttacaaaaatctcatatccgagaaattttgcagcgttttcagcatgggtgataagtgttttctcatcggacagtgtaagagccaacttttcatagaggaagttctttatgtcctctttgatgatgatagcatcttgtttactgccaatgattccaattagaaaatcatccgcatatctcacgtatttgagttttctgtagttcatatccatttcgtcaccatcagaatactgcaaaccttctttttgataagccttatattgtcttatcaattctgacctttcatttttgtcttttaccactttcaactttttcagaatacggtgtcgtttgccttcaagtgatactgcctgtttggttcttttccgttctttccccttatcaaatttttcagtgtattccttcatgaatttatccaacttatcaaggtatatgtttgccaagatagggctgacaattccgccttgcggtgttccgctgtaggagttatgaaagttccagtcttcgatatatcctgcattcagaaattttctaatcaagcgaataaatctttcgtcagcgatacgttctttcagaatacctatcagtatctcatgattgatattgtcgaaaaatcccttaatatcaccttctacgaaccatttcacgcccgaaaatgtcttctgaatatcagacaaggcagtgtggcagcttcttaggggtcggaagccatgcgacgttttttcaaactgtctttcatagatggcttccaatatcattctgaccacttcctgcaataatttatcgttaaaagctggtacacctaatggacgcattttcccatttttctttgggatatacacccgttttgagggttggggctgataactctcatctttcaacgatgttatcagttgttcaattcggttcaggctcatttggtcaatggttttcccatctgcacctgctgtcatattgcccggtttcgcatatatgcgttggtaggcaacgtaatacatttcctcattgaaaaagatacggtacaagcgttcgaacttgtaattcaaattttcactgtgttccgttagactgtttaatacatactctggacttctcataatgtctctcacattttccgttatttgcattaaaattattagctgcttcccttcgccatgtacagggctttcccctgctcagactactacggaagctccgttgccttgtcggattttcataggtctgtacctaatagccttgcggcgttccgatttaggcaatccccgtttacgatataataacatggctatgatagattatcggatatgacttccgcccgttaccgcttactgcggttgtgccgtaatttgttcctgcctctactacacgacgctcgcaacagaggtattacggtatagcgagttaagttatctttcactataaaacatactgggttcacttggactatcattcaatcagtttggattttatcctcgtatctatctgtttcatctcaccattcagttgcaatttgataactaattgacttatggctttccagcgtgctatactccctgccgtcctttcgtgggcagataagctggtgatgataggtaaatattggaacacttacctaatagcttgccaatgctatatttattatatcgcctatacgggcgcaccatcgtaataagccttcccttgcttataaatctttacagtctcctgaaaattactccacatgttctgtgcagttgtggaagtctgtacgatttcattggccgagttcacgatactctgtgcgagattcgtggggtctatcaccgtccattgcgccttgcttgtcactgaaagggatgacaatgccataaacaaaattatcgttctcttcttcatgccctatctcctttctttagtcagtaaataccggctgtcgtcatcacgggcaaacagaccgtaactgccgaacagcaacacctcgctgcctgaaaaatacccgatgcatccggcatccctgttcccgtgcaggaaaagatcgtcaccaccgcgcagcgggatattgatttcaacgtaggccctttctccggcgaacagcgtggccttgtatcccttgaagccgtccgtcacccagttggatttacggatggtcagcgtcgagctgccttccctgttcattcagtgcccgcagatgcggtcatgttccagttcctttctcatctccccaatcaggttcagcaggtccagattggtcagggtggcgtctccgagcgcttccctgcattggcttaataaatctttcttactcattgtgttttatggattaaaggattgtttgttttcctgccgcttgttttcggcaagctgtctgatagccagctcgatgtttccatccagcttttccgtaagcctggtaagttccagtttttcagtctcttctgtggtgtagcaaaggtattcttcagccgaaacttctgtcgcatataccgcactttgtgtaccgccaagccctatccagacctctttataaagccggttggccgcattggcaagattgatggaaagtatctgtgagcgttccttgtccgtcaggccgagcaggttctgtatctggtcgaacttgttctggtactttcgttggtcaagcagtatcttgcagtccgaattgttgatgattgtctcctttacaaccggactcgatatgatgtcgtccacttcctgcgtcaccacaaccgcttcgccgaaaaattttctgaccgtcttaaacaaatatttaatataagaggccataccttccttggcgattgcctttcatgcttcctcaatcagtatcatcttgcggatgccctgcaagcgtctcattttattaatgaaagtctccatgataatgatagtcaccaccggaaaaaggacgggattatccttcacgacatccagttcgaatacgatgaaccgcttgttcagtaaatccagttccttgtccgagttcagcagatacccgtattcgccgttcttgtaatagggttccagcacgttcagaaaaccgtccacgtcaaagtccttctcgcgcacgttcttgtccgccagcaccttgcggtagtctttccttacaaagtcatagaacgagttgaagttcggctttatcttccggttcttctttatcttctcgatatacaggctgactgcgttcgagagcgccacctcttccgagcgccggggcggttcgtcctcccttttccataaggtcagaatcagcgtcttgatgctgtcccgcttctcgatgtcataccggtaatcctcggtgaagaacggattgaaggaaatcgggtcattttcctggtaagtgaaataaactccgtcatccccgttcgtcttccggcggatcaggtcgcacagccccttgtatgaatttccggtatccaccagcaggatgtgcgtgccctgttcccaatactgcctcaccatatggttggtgaaaaagctctttccgctgcccgacgggccgaggatgaacttgttccggttggtcaccaccccttttttcatgggcaggtcggatatgtcgaggaagacgggctttcccgtcagccggtccaccatgcgcagcccgaagggggagagcgagttccggtagcaggtttctgccgtaaagaagcatagtgcctgttcggtgaacgtgtagaagctctcttccgaagggaagtccgcctcgtttcccggtatgcccgcccagtaaaggaccggcaggtcggtggtattatggcggggtgtgcattccatcagcgccagtgcgctgcccacgtcgttcttcacccgccgcagctcatccccgttttcggcccatgcaatcacgttgcaatggcagcggacggattgcagcccgttggtgtgcgccacgttcaggtattcgtccagccattccttgtttatctggttgctccggctgtagcgtgaaagcgactgcatgttcttcgccgtcttctcaaaacgggcgaggttctcgctgctgtcgtctatgaatatccactggttgtagatatggtcgcagggaagcatgatacccacgggcgaggcatagctcaggcggcagtccgagcggtccgtggaaagacgctcatagcgtccgtcggtccgtaccctgcccggcaggtcgtcgaggtcggaaagggtatgcaggcagagccgtttgtcgccgatacgcatcccgtccgggttcagctgcatgtcctgcaacatgacgcttccgtccgaagacagggtcaggtacctctcgatgatgcccgggccgtcttccgttcccgttatctcttccgtggacagccgctccagcctggcaaggccgctgtcattcacgatactctcgaactgtcccaccgactccatgaaacgctccatcgtctccctgtcctgtatctccttcggcaccagaaatttccggcacagcgtgttccagttgctctgctgccgggagcgttccctggtggtcttggtgagaaacaggtagcaggtgtggttgaggtagggccgttcgttgaagtggcgttcaaaactgcgggagaggaagcccgggccgtcttttccgatgtcgggcctgtatttctccgtgatgaaaatatcctgcttgtggatgattgaatagttcggcaataccttgattgccttggctcatgtggcgtgcatcgcctcatattccgcggatgataccgaaaacacttccggcagtgtcacccggaaagccaccgtgatgtcggcgtccttgctgacgatgcagccgtgctccaccgccatgacggggaatttgctttccagtgtggatgttgtcaatgtacttctcatgatttacgattgttgttttttaatcagacgtgtgatacgtttgcgtgagaggattctcctgggatgctgccgggcggcaaggagcttcatcagtccgtggctgccgaaacgccggttcagcgaaaaggtcagccagaccactgccgtggcagccgataccccgaagccgatacacgtccattgcccgatgcccgccgtgtacatgatgacgaacaccacgaacacggcaagcagcccgaaagcaaaaataaaaaggtactgggcacggagccctttgaactccacctcacggcccacgcctttgtttatctcaaagtcagacataagctattgtcttttatctgttcttagaggaagaatgacctcaggatagtggcggccactatcaggaaaatgcaggctccgaaccatgagctggcggttttcgaggtgtcggggtcgcccgaactgaatttctggtagaccttgacgccgcctatcaggccgataatggcacccaccgcgtacaccagtttcgtgcccgggtcaaaatatcccgtcaccaactgcgtggcttccgtgatgcccgcctgtccgtttccttgtgccattgccgcacccgctgccgccagtacggccagcatcataatcaatcttttctgtttcattgaattccgtgatttttaagtgatttaaaaagccacgggctaccccttgcactatccccataaggcagcccgcagccgcttatggtttaatggttcagggggtaagttccggcaggcaatcagccggagtcaaaatacatctttcgcatggttacatgattgaatggtgaaacttcattgttaattctctcccgggatgagggtctgaatcatcccgaatcgtaatagccttttgctctcattgtctttactgtccttatcggtttatttcaaatattccccacacttgaatcccttgcggggcatatagttctcaaaggaggaggatttgaacagccacatccggttcgcccaccgggcaaggtcacgctcgtaccgcgtaggcgtccgttcatttccataatcccggaaagggatgacaaagggggtaattcccagttccctgagtacatttaaccggaacaggtcctgctcaatggtcgaattgaatcctatcagtacgtaacaggttatcttgtagggcttcacgtgctttaccatctctttcaggcggtccctcaggtcaagctgcggcaggtcccatgcgatatggatgttctgcttcatcctgagcctgttcaggtgccaggcctgttcctcgtccataatccttacgtccacgccgtgcagcttcacgggctggcccgctttcatcagatagcttaccgcactccttcactgcgggttcgcaaagaaattgttgtccagcacctcaatccatttccctttcgggttcagttccaccggttccacggtctgaatgtatccttctttctcacggacgaggcagaaaggacacttgcggatgcagcctcttgaaaagaactggagcgaaaaagggtattcggggtaaatggaatagtccatcatccggctgttctccactgcttcgggaagcctgccggctatgtcatacccggtgccgccccttaccacttcccccacatccagcaggtcataatcataatcaggcgtgaaggtgaataccttgcttgccaataccttgtcataccgctgtcgcagtgccgcccattccacccggtgcccttttgccttgtaacaggccgaaaggcgcatcagtgcgaaattggggaagttatgcccgtccacatctaccagtcctatgttcatacaaataaaatttaatggtgaatagttcctgttgtcttaccgggtgaatgccgcaagcggtctgtcatcccgaatcgtaatggccttttgtcattaccgctgtcgttttatggataagttaatggaatgactgtctctccgggagtcggtacgtttcccccataaggggaagccgccgtttgtcaacttgaatcgaaatacgtcataaacatggatgatacgttttgttgttggtattcctgccggttctctctttttacagtgatacgggcatcaacccgtatcgaaatagcctcttgccattgttacctccttttttaatcggttagtcactgtccggagcagccccgcccatttgctcgacttcatccagaaatttgctgatacggctgtcgctgccattgatactttccagtatcgagcgttcaatctgcgtatccctgatatggtggatcgcccttaaaagggacaatcgtctgtctgtcggaatctccctgccgttgcagaggtcgatgattaaatcaagctcttccggccctatgccggttgccccgtccgaataatcttcgcggacacagttcagatcttccagttcttcgttcaactcgtcggtatccactccgtcaccgtttcctctctgtccgtcatcgccttcatgtccgccggaactcccgtccggggaagcccgccactcttccacacgcttgtcccggaacagatccgggatgcgctccggcggcacttgtgcagcctttggcggtgtcgtgtccccgtttctgccagcaaaagtagaggcattttccttacctgcaatagccccggaaccggtggcgttcattggcggctgctggcgtgtcccatagcttttcgtgacgacaaggctgtccgtttccgactgtttttccaccgttttttcactgcttctctccgcagtcttttctgtgggcttcatcgccgccttgacaggtggaagctctttctcctgccttttcacgactgtcggaatctctttcctgcccgttttccctttcgcctgtccacgtcccttcttccgttcctccttcaccggatcgaaccagcctgccgcaccccgcagggctttcgccatgcggcggcgtgccttcccgaaacatatctcgccaagctgccccctgaacaggaacttgtccatgaacagataggcgaacagcagccagaacagaaccgctccggcttcataacataatcgcatatccatagcttaaaagattttgttgtaactcttctggcagtatgccttcacctcatccgaatgtttctcgaaatgttcccgcaatacattgtcaatgtaattgcccaccgtcaactgccgtttaccggcaatgccgacgatgaccgatattttccggtgtagttccttgtctatatagacaccctgcctgccttcgcatttgtaaggggtgaggaatctcctcataaattcggtctgtgcggctttcaacgttttggatgcggccttttccggcgtctcttccgcttcagattccgtctttgccttttcagccgtttccctgtccgtttcctctttggggggaatggacggtgttaccttttccggcggactacccgccatcaggctgcgcaggtaggcttcatccaccggattctgtccactcgttttctttaccatgactatacaattttgattgtccgcatgatttcatccataagcgcatcaaagccgcactccttcgtaaagcccgcatccggtgcaaacagggtgctccggtaaaccgggccgcccgtagtggagaggtctttggtgaagttactgcgcacggggacacgggtttggagacagtccagtcccaggagggagaaaccttgctggtaaatgtcatataagacggtacgttccctccggtccaccatattccagaacatgcacaaggctttcagattggagatgccggtccttatcaagcggtcattgacagtcgtggcaaagttcagcgtgctttccagcacaaggcggtctgcctttatcggtacgaacagataatcgagtgcactgattgtggcaatcaccccgtcactgcccattgttccgggcaggtcgaacagcaccacatcataatgcacgtctgccttttcctcaaacgcccttcagtccgtcatgcaatccgccggggtactgccgataacagggtaagccttcttcttcaaccgcccggcctgttccaccagaagattctgatagacgggtgtggtctttaccacttccatatcccgttttttctgtttgatgattgaatgctgcggatagtcacaatccactatcgccacattcagacctttcacataatgcagtcacgacgccgcataaatcgcaaaggttgatttacccacgccgcccttctgggaggcgaacgaaacgaacacggttttctttctcttttccattgttactgatttaaatgaattaattgatttatagacagccagatgaacagccgtctgtctttggggccatctgtccggttactcattctgttatctgtttgtccaattagctatatagtaatttaattatgcggctacttggctatccggctatctacttatatagctactctattacatggctatttaattatgtagctattcagctatctgtctattcggctatgtagctatatagctatgtacatattcggatagctattcacatatccgattgcatagccatttatccgaatagctgtttatccgtctatacatttatatatatgtatagctatatatccggataaatgcctgtttgaatatctacctgattgcatatctgtttatccgttcaaatagctatccggctacaaataaacctcaaaaagagcatccatgaagtacccccggctccaaagtcattcattggcgggtgttggcgtgatacgccatgatgcacggacagaaaaaactatctacctttgtcgcagggagagcgcagcccgttctcggtaagagaacgtaagacaaatccttcagacctttaatccggcacagccggattttaatatgcgtcagcatatagcgaggtgtactttcagcggttgaaaatatttccaaccgctgaaagtcccgccccgaaaggcctttcggggatgtcagttctcccaagtcgaacttcctaaattattcatgttatgaaagatgaaacaagaatccgtagcgccgcagggcgcaaggtgctggcggacccgcgtacgcaccgctattatctctgtctcaatgacagtgagaacgagaagtttctcacgatgtttgaacagtccggcatgaagaacaaggccgaatttatctttgcccgcatcttcggctgagagttcaaggtagtgaggattgataaggaagcgcaggaatattatgcccggctgaccgctttctatcagcagttccgccgtatcggaaacaactacaaccaatgtgtaaagaccatccataccatttatggggaaaagaaatcgcttgccttcctttataaactggccgaagaaacccgcaaactggaggaactctgcaaacagattatcgaactgacaaaacggtacgaaaaagagtatctcactaaaaaggaataacatcatggtgccgaatatcacatccggcagttcattctatggagtgattgcctataataagataaaggtggacgaaggtatggcaaaggtattgtgacatcccaaaattgcggctgacacttcgggcaatgtgccgattgaacactgcgtgcaggcttttgagccttacatcgcactcaactcgcacgtccggaaaccggttatccacatctccctgaacccatccccgaaagacattctttcggaagagcagatgaccgtattggctcaggagttcatggaaaacttcggttacgggaaccagccctatattgcatggctgcatgaagacatagaccgcaagcacatgcacatcgtatcggtacgtattgatgaaaccggagaaaaaatagaccataaccgggaagctatccgggcacagaacatctgccgtgaaatggaagtgaagtacgggcttcatcccacactcggagaacacggtgagagggaactatcatccctacaaaaagtggactatgcgaaaggagacgtgaaagcacaggtaaagcataccgcccgaaccttgctggaatgttacaactgtcactcgcttgccgaatatggcactcttctgaacctgtataacgtaaccgtttatgaagtcaggggaagtgtggacgggaaggaataccacggtattatgtacggagctttggatgataacggacagcaggtgggaacacctttcaagtccagcaagttcggtaaggcattcggttatgaagcactgcaaaagaagtttgccgcttctactgaaaaggtgaaaaggaacagccttgccgaaaggacaagacaggaagtcattaaagccatgcaggacatcggcacgaaagaggatttcgcccgaaagctgaaagaggcggatatagagacggtttaccgtatcaatcccgaaggacgtctgtacggcatcactttcatagaccataccagccggacagtgcttaacggctcgcgtctgggcaaggccttttcagccaatgtgttcaacgaattgttcaacaatccggatgcggaccgtacaaggctgataccaccgccggagcaggatacaccccggccggaacaagatacgaaagaaagactggaaaggaaggaataccggcagcaggaaaatcaaggctatcagagtgaactgtccggcagtctgattgatacgtccgcactcggtgccattgacattttctccctactcatggaagatgaccatacgcacgagtacatcgatccggccttccgcttcggacgcaggaaaaagaagaagcgcaggcgcaaattataatataattaaggtatagaacaaaaagtcgaattttaacagttacaattatgcagaatgaagatgatttaagaggtcttgccaaagtcacggactttatgcgggccgtcagttttctatttttggcgatacacatctattggttttgttacggctggctacacgaaatgggctggacgcttgatattgtggacaggatactgtccaatttccagcgtaccacaggactgttctcgtcccttctttacaccaaactgttttgtgtcctcttcctcggtctgtcctgcatgggcaaccagggggtaaagaagcatgaaatcacatgaaggaaaataattattgcggccatagcgggtgccatactctttttcctgaactggtggttactgtccattgacgcatcatccggtgtatgcgccatactttataccgtgacattggccggcggtttcttctgcctgttggcatccggtttatggattagccgtctgttgaagaacaatttgctggaggacgttttcaataccgaaaatgaatcgttcatgcaggaaacccgccttatggaaaacgagtattccattaacctgccgaccaaattctggtacgggagaaaggaatggaaaggctggataaacgtggtgaatcctttccgggccagcatgattttaggtacaccgggtagcggaaaatcgtatgccgtggtcaataattacataaagcaggcaatagagaagtcctatgctctttatatatacgactttaaatttgatgacctgtcggttattgcctataaccacctgattaagtacagacaccgctataagataccgcccaagttctacgtgataaatttcgataacccacgcaagagccatcgctgtaacccgctggcaccggaactgatgacggatatttcagacgcttacgagtcgtcgtacaccataatgcttaacctcaataagtcgtgggtgcaaaaacaaggggacttcttcgtagaatccccgattgtattgtttacggcgataatatggttcttgaagttgtatgaaaatggcaagtattgtacgttccctcatgcgatagaactattgaacaaaaggtacgaggatgtattcaccattctgacaagctatcccgaacttgaaaactatttgagcccgtttattgatgcgtggaaaggcggtgccagtgagcagttaatgggacagattgcatctgccaaaatcccgctttcccgactgataagcccgcaactctactgggtgatgtccggcagtgactttacgctggatattaataatcccaaagagcctaaggttttatgtgtgggcaacaatcccgatagaatttctatttatggagcagctttaggtctgtataactcccgtattgtgaagttaataaacaagaagaagcaaatgaaaagctgtgtgataattgacgagttacccaccattttctttaaaggtctggataatctgattgccacggcacgaagtaataaagtggcggttgtgttgggctttcaggacttcagccagttaaagcgcgattacggagacaaggaagctgctgtaatcatgtcaactgttggtaatgttttcagcggccaggtggtaggtgaaaccgccaaaacactgtcggagaggttcggaaaaattcttcaaaagcgggaatccatgagcatcaaccgtaacgatacgtccacttccatcagcacccaactggacagtctgatacctgccagcaaaatcagtacgttatcgcaaggtatgtttgtcggtgcggtagccgataacttcggtgagacaatcgagcagaagattttccatgcgcagatagtggtggacaatgaagccgtacagaaagagacggcggcctatcaacccattcccgaaatcagcagctttctggatgagaacggcaatgatacaatggagcaacagatacaggccaactaccggcaaatcaagcaggatattgtggaactggtagaaaacgaactgatccgcatagagaatgacccggaactcaaacatctgttgggagagaatggaaattaaaattataatgacattaatagggaatatatcgaataaggtttttagggtaccgattttcaacaatccagttccttattctatataaattctaatattgaataaaaaaagcactacttcttgttaatgatactacaagaatagtgctttttatcttataacgattttcaaaatacctttttaagtttctcccacaatacattaggattaattccgactcccaaaggtcccatgcctaaattaatggaagaaagcaggctgctattttgtttatcaatagactctgcaatatgattaattgttcccatcaggtctgtaacatttaccattgcacttttttttataaaattcaacaattctatagaaggtggtaaaagccctattgaaatcaataaactaatagctgtattaacaatctccgtcccccattctttcctaaacttcgcacttaaacaaattttccatagcaatgattgtgcctttaaagaataattggaaattttatctacatcaggaggtaatagcaagtattcgatataataatcaaccgtaaatggctgcttgatatgagtaatgaatttaatcatttgtaaggggatattctccaccgttacatccatatattgtagtaaactggaacacgatgcaatattattcactacttcataagtatctatactctcatttgaaaaattaaatccatcttcatttattgtacaatatgtagcaacaacatcaagacttttatccttgaataaaaaaatgcgaataccttttgacctatagaagtaattcattctaccaaaggcagagccataaattccatcataaagtataattcccttttgaggataaaatgatatatatttatctttcgttttcgaggacttacttctttcattttgaagctcctctatagattggctaatgcgtagtggtattttttgcattatgctattttgagaagtaagtaactctatagttctattaaaagatataacatccaattccctattcatacctaaagctttaagaacggcggccacaagtaatttttctaaaacatcttttgttaccatatgatataatcttaaaaatcaatacctcatatgcaaatataatcaaaccaaatgaatgatagatgattataattcatatttttaaataacagctattattttcggaaacgccattttccgccaaatcccgccattcctttccgccatccccggaactgtaataacctatcaattaaacctctacattcgcaccgacgggctaaggtttacccgatattgattaattattgtatcacttaaactattaattttatggctaagaaaaaacaagagcaacaagagcagagtcaggacgagcatgtaatggcagtccttgacaagagaacgaacaagaccgcagtcatctccaagatgaacgaacaggacggcagcatcgaagtcgtaccgccggacaaaaagaacaacaacagttttctcaaactggaccgtaccacatctctggaactgttcttcacgaatttcaagaaccagtaccaaaatcccacaagcttcagtttcttccttgtaccacttgccgttttggacaagacactgaacgcggtcatccagattcggaaaggggaagaccccggaccggacggcaagaaactggtagaaaacagcgaactcaacgacgagggacgtatcgccaaactggcccggcggtataagtttgatgagcaccagctgccgtggaaagatctgaacgcacttggtcttgacaaggagactctgttcaacaaccattgcatgggagaacttctcaaaggaagaatcacttccaccgcactgcccatcagcaaggagataaacggagaaaagaaagatttgggcgaggcctgtttcatgtgtgtgaaaggtgcggacggcaaagtggaactcaagacactcacccgtctggacaagccccaatatgatttgccggtctataaaggcgtattcacggatgaagagaaggacaaactggccgaaacgggtacgttgggaggaatcaaggaaatgaaggacacgcttaccggaaatgtctgcaaatgctatgtcagtttccacgagtccaccaaccgcatcatcaccatgcccgtggatgccatcaaaatcccggactacatttatgggaagagactggacgacaagcagaagcagatactcgcttcaggtggcgaagtccccatcaatgacatacagcgcaagaacgacaccatgctttccggtgtggcctatgtcgatccgaccataagggacatcgcattcaaacagtccgacaagcagctgaaggtcagcgatacgattctgggagccaagataacccccgaacagaaaaagatactggagaatcacggaatggtattcattgagaacatgcgcaatcccaagaccagacagctgttctcggatgatgtgcgtttcagcaacaagagcaacaacctgctcataggacgcaatgcccgtgaatacaagccggcggttgaaaaccccaaaaacgacaggaaacaagaaacaaagcagacggcccgccatgtcgtatctcccagaccgcaggccagaaagaacagcctctcgttctcgtaatccggcagcaggcggaacgtttaccgaatccatatacccggtttcctctcaggttaccgggtatgtcacaaattatttccccattcaaaatccaatgacaacagatgatgattacacaacatgacaacaacggagaactgtcctgcttcaagtcagctctccttttttatttgagagaaagccatccgcacatggccgatgacaaggcattcatccgggagcgtgcggacagtgccgcagaggcttacgaacatgccatacgtgacggcctatccgtcaggcaggctttggaacaggctgacgccgttctctatcaggacttgcgcttttcccggttcgatacggttttcgaggccgtatcggagtggtttcccgaagtacggcccgaaagacggacggatttctgcctgaaggtattgtcgcccgcagaggcggtattcggcaaatattccatagacgacaggtttgaatcatctccggcctgtcatacacttaccgttgaacttacaggtttcatacaatcctatatagaacaatatggcatataacagacgacaacatctggcggacaacatagccgcacttgaactgatattcatgcgtccggagttctctcttacagaacagggacgcaaggtcttgaacggttattcgggtttcggaggactgaagtgcatcctgaatccggcggagaaagatacggacatagaaaaatgaaggtcggacaaagaactgtttccccaggtccggctgctgcatgaacttctgcgtgagtattccaaagatgagaaagaatacaagtcatacgtccaaagtcttaagaattccgtccttacagccttttacacacccgagccggtggtaacggccatgcaggaagccctgctgataccggaaatccgcccggaacgttttcttgacccttccgccggaacgggcatgttcatcagcactctgaaggatgtccccgaaatccattgcttcgagaaggacaggctgacgggaaggatactctcatccctctatccggaaagcaaggtgaacatagagggtttccagtccatacagccttattataacggctacttcgatgttgtttcttccaatatcccgtttgggaataccaggatttatgaccgggactttgaccggagtgacgacccggtgcgcaaatcctcactcgctgccgtacacaactatttctttctcaaaggcatggatacgctgcgcgaaggcgggatactggcctatatcacgacttcgggcgtcatggactcgccacagaaccgtcccgtcagggattggctggtaaaccatgccaatctcgtttctaccatccgtctgccggacaatctgtttaccgatgcgggtacggaagtgggcagcgacctgatcgtattgcagaagaatacccgaaaatcggaactgaccgaaaaggaacggaactttattgaaacccgtcttatatcgggcagtatcaatatcaacaacagctatgccgatttggaccatatcatccatacttccgtatccatgggtaaaaacatgtacggacaaccggccatgaattttatccatgaagggggtatcggagccatttccgaacatctcaggctattattggcccaagatgtgggaaaccatcttgaccggaaactttatgaagaaaacctgtcccgttccaccgtttccactgccctgaaaaccggaccggaagttccaccggaaacaacagcagtggagcaccggcaggagatgcaggaagaaagtctcctttccaccaagccttatgaacccatgcttaatctgtttgccgcctatgcggacgaggaggaagcggaggtgcagatgatggaaagccggccatcaccgggccggacagcgtcggcatcccgcaaaagaaaaggaaacgaaccggaaatgttcaatctgttctcgcaagagaacatgtatgatgaagccgtctcacaagaagaaatgaccggggaacaggcggcagcggaagcgaaatggcaggaacgcagactacggttcgaggaagaacggaaaaaagaaacggaaccacgtccgtttaccggagaaatacgccccgaatacaagaacggctctctcgtgaaagccggtgagcaatacggatatttgcagggattgggtactcccgaagtacagttccatccgctcaggctgactgtcacacaacaataccgggccgcctactatatcccgctccgtgaagcctaccacaatctctacaatgtggaagccgaaacggaaaccgaacagccggaactaagggaggaactgaaccggcagtatgaccgtttccaccgcatgttcagggagctgaacggaaaggacaacgccaagttcctgctgttggatgcaggaggacgggaaatgctctcattggagcgttccgtcaacgggaagatacagaaggcggacatattcaccgtgcccgtatcgttcaacgccaatgaagtgacacatgtggatacaccgcaggaagcccttgcggcatccctgaacaagttcggcgaggtcaatctggaatatatggagaatctctgcgacatcggcaggcaggaactgctcgaacagctggaagagcgcatcttctacaatcccatgatgaagagccatgaaatcaaggaccgtttcatagcgggcaatgtgatcgccaaagcagaatggatagagaaccacctgagagactatcccgatgacggagcgagcagaaaatcattggaggcccttcggaaagccataccggagcccataagttttgaacagcttgacttcaacctgggggaacggtggatacccatgtccgatatgaggaattcgccggatacctcttcgagacaaaggcccatatccactatacggaatccatcgacgaattcagcgtaagcttcgagagcaccaacgcgaacatcaccgacagatattatgtgaaaggggaaaagagaggctattacggaaacgacctgctgaaacatgcgctgcacaacaccgtacccgacataaccaagaccgtacaggacaaggagggcaatgacattaaggtacgggatgcggaggccatccagcttgccgacaccaaaatcaacgagatacgttccgccttcaccggctggctgaatgaacagctgcccgaattcaagcagaaccttgcggacatgtacaaccgcaagttcaactgctatgtacgtcccgattacgacggttccctgcaaagcttcccgttccttgacctgaaagggctgggcataccgtccctgtacgacagccagaaaaatgccgtatggatgctgaagatgaacggaggcgggataatcgaccatcaggtaggtacgggcaaaacccttatcatgtgtatagccgcctttgagatgaaacgtctcggactggcgaacaagccgatgattatcggactcaaaagcaatgtgcatgacatagccgacacgttcaagagggcctatccgaatgccagagtgctgtatccgggcaaggaggactttacgccggagaagcgtgtcggaatattccatgacatcaagaacaacaactgggactgcatcatcctgacacacgaccagttcgggaaaataccccagtcccccgaaatacagcaggaaatatatacgcaggaaatagacagcatcgaagagaatctcgccgtattcgagcagcagggcaatgaagtgaccggctggataaagaaggggctggaaagaagaaaggaaaaccttgaggccaaacttgaaaagctggaacaggatataaaggaccggacggatgatgttacagatttcaggcagatgggcatcgaccacctcttcgttgacgaatcgcacaatttcaagaacctgatgttcaacacacgccatgcgagggtttccggcctgggcaatcccgaaggaagcatgaaggccatgaacatgcttttcgccatccgtaccatacaggagcgtacgggcagggatttgggggccactttcttgtccggtacgaccatctccaacagcctgacagaactctatctccttttcaagtatctccgtccgaaggaaatggagcggcaggggattacctgttttgacggttgggcggccgtctatgcgaagaaaagcacggactttgaattttcagtgaccaaccaggtggtgcagaaagagcgtttccgctattttatcaaggtgccggaactcgccaatttttatgcggagataaccgattacaaaacggccgaggacgtaggggttgacaggccggaactcaacgagcaactctatcacataccgcccactccccagcaggagattttcattcaaaaactgataaagttcgctgaaaccggggatgcgacctacatagacagggagcctctgtccgaagcggaggagaaggcacagatgctgatcgccaccaactactcgaacaagatgtcgcttgacatgcggctgatagaccagcagtacggcgacagtccgggaaacaaggcgtcccattgcgcggccaagattgcggagtattactacaaatatcttgaccagaaaggcacacagttcattttttcagacttgagtacctataaacccgaccagtggaacatctacagtgagataaggcgcaaactcgtggaagaccataatatcccggaaaagcagataaagttcattcaggaggcgaacagcgacaacgcacgcaaggaactgttcaaggatatgaattccgggcgcatccgtttccttttcggttccacacagaaactgggaacgggtgtcaacgcgcaggaacgtgccgtggccatccatcatctggacataccctgaaggccgtccgatctggagcagcgcaacggacgcgcggtgagaaaaggcaatatcatcgccaagcagtacgccggcaacaaggtggactgctatatctatgcggtggagaagtcactggacagctacaagttcaacctgctgcaaaacaagcaggtgttcatcaaccagctcaaaagccgcaatctggccgcccgtaccattgacgagggggcgattgacgaaaacggaggcggcagtttcagcgaatacgtggccatcctttcaggcaacgacgacctgctggaaaaggcgaagctggacaagaaactggcggtcctcgaaagcgagaggcaggcattccaccgtaacaagggaaacgcgaaaggcaagctgaatgaaaggacttcgggaatagaaaaaaacaatgcctttatcgggcgtttcaccagggactgggaatatttcaacaaggtggcccccgcagatgcgaaaaccggactccgtcccaatcccctgaaactggacggtgtggattcggacaacgtggagatactcggcaaccggcttgccgcaatcaaccggaatgcccggacggaggatgactatatgaaaatcgggaccctgttcgatttccgcatccttgtccgtaccgaaaggacctgtgagggggacatgcaggctttgcagaacaagttcatggtcgaggggctggacggtatcaaatatacctacaacaacggttatattgccaaagacccgaaactggccgtcatgaacttcatcaatgcgctggaacgcattcccgccatgatagagaaacgggagcaggaaaacgcggagctgtcgaaggacatcccggtccttcaggagattgtggcggcttcatggcccaaggatgcggaaatcaagcggctgaatgaggaacttgccacgctgaaccggaaaatacagcttaccataaaaccggcaggcgggcatgaaagcggaacggatgacggaacggaaatgaaaggacagaaagcgacaggcgaaagtgacgataaaccggacctgccacggaaggcaaggcatgtacccccaatggaaattgccaccccgtcaaacggactgaaaaaaatatcctaagtttgccgtaaagagccgcttttcaggaaatgacaaaggtatggccggcacccggataaatccggtctgccggccatactcttatctgtaatgggaagaagggcactccgtcattcctcttcctcaaaggaaaggctttccacctgtctgttaataaccttccagtcaatggaatccttcagattgattatatccacaatcgaataatgcctggtcccgttctcctcttccgcaaaacgcagccgtccgctcaaacgctgcttctcaatctctgccggatcgaggtttatcagctcacaaacctcatcgggcagcatggagagttctacacagttatcctcacagatatgttgcagcacggccaacatgttgagggacttcttgtaacttctcacgagtgcggcgaacgagccgctttcaaccttaatcatctttctcataaccttttatttttagagtgttcttctttttcaagcagcatggcacgcagcacgtccgaacggcgatagtaaatcttccccttgtcacggtggaaaggcaatgaaccgtcattgcggcgtcttagaagtgtcctgtcggacattttggtaagcaggcgcacgccttttgaatccagtatctcgctgtcgggcaagttatgtatggcaggagccagtaacttttcaatgttggttactttggcgagtatggtactgagcatgtgggtcatctgcccaccaggtgcagttcttctgttattcataatgaccttgtttttattgtttatggtgcaatattacggagatattataaagccattggttactcaaccgttgagcaaccgccaaaaaaagacagaaaacgccaagccgggacaaaaaatagccgggaggcagtgtctacggctattctataacaagtaggcatcaataagttatgccttcaattattaatatgttaataatcagacgcagctatatactttattgtaccaacgattgtgtataataaatggttgaactttaatatgccaatccgctaaaacgcagattggcattattaaaccacatcaatcataatttttgagtaaactcaaaaaaactgacaatacgagttttgtttagcattctcattttccatctcattgataaaaaaggattaaagatttgacttacaatctttttaactacacacatttaaaggtgttcagcatttaaaagagacttatagtgcgaacagctattgtttttttagttaactttgcattttaaccaactgatagaataacaaataaagcatgaatgataatgtattaacatcttattcctttctagctgctttgtcagaaaacgaaactgacatatataaaaccgtttatttacctctatttaaaagggcaatatcttcgtatgcagcaaagaaatcttctaaggaatcaaattcaattcaaggcacagatattgatatacagagtattatccttgaagaatatggtattgaggttccaattcttattgtaagaaaattaataaaagcagtaggcacttctttatcaaagaaagaacgtaatatattcaaatttgatacttttgaagacggaaaagcctttcaatttactaattataattacttttctacagaagaaatttatgatagagaaagacgcaatgctcaagctctacaacaggcttttgaagactatcttaaatcagagaatttatcagaaaaaaacattccaagtttttcacaattcatagataagaataaatgtaatctaagttctttcttttcaggaaaaaactgtttaatacatgatgtagaaggttcttttatggctcatgttaattttctacagcatatagaaggaggttatcactatctttatcaaactgctgaacgaatctatttaggttctgttatagcttcttttctagaaacgggagtggatttagaatccaaaatagatgataatattatctattacttagatactcaaatcgttttagaagcattagatttacagaaggcagaagacacattaccaactcaagaattattaaagcttataagagcaacaggaggtaaaattagattactcgacattacaatcaacgaaattcataaaataatcgaattagcaataaataattatagtaagagccatcctactactactgtaaatgaagcgtgtgtacgaattggtaaaaacaagacttggttgataagtattaatgggaaattggaatctttcattaaagcagaactgcaagtagatattgatggtattttggaaacaaaaatgaatctatattccagatcagaggacgttaatttattaaaacagacacgaatacataaaagtactgcaattcatgatgtagctgcctatttacatgttcgagatcgtcgagagggtaatattagattatttcaaaaagctaaatattggtttgttacagctaacaagaagttagctgatttcaatatttcacgcaagacaaatgggtttgttaatgaaactattatgcctgaagaactaactagcctgctattccttaaaaaccctcaaaaattggctaaaaaggtatctcaaataggacttaacgaacttattgcacagactctctctgaagaatatgcaagtaaagagcttataaatgaaattgatattgctattaaagaatctgcagatttgagtgccgaagattataacatattattttcttctattgctttgcaatcaactaataaaatccagaaattacttgaggaaatcagcgataaaagaaagtttaatgaaagtatccataatttaattgaaaaggaaagaactaaacaagctaagtcaaaagaggaaaaaatacaaagacaaaagcagtttgaagaagtaaatcatgagaaactatctttagaggaaaagttgaaaaacctagaagctaagctatcgcaaggggaaaaggagcggaaagaacagcaagaacgcattaggaaaatagaagaacaacaagctgaatcattattaaagagaaaaaaagctcaacgtagtttttggttagcattaggcggactaatcctctcagcagttatttttctagttgctttatattatccaacattattttctggaatgaaagattttataaaaggcatagcttctctggggggagtatggggattaattagtttaataattaacatatgtaaactttttcacaaatagtatgcttgagtaaatcgtctacgatatgcgtgtataaagtataagagggcataccagtttccctgtatgccctgaggctgtaaactaaactgtgtcagcaaagactaaaatattaactttgctaacacagtttaggggcattcagaaaatgcctctaaaaagtaagatgtcgtataaaactgataaacgataatctttccatatgccattttattgtaattttactgaatgtctcctgtttaatttacaatctcccagccagtcattatacagtgaccaaagtatatagctacgctaataaatttgtttaccaagacagccggaagcaacctccagccattcttgaaagaataggcatccaaagctcatgcctgccagtattcattcctaacctcctctccttacattacatggaaaaatgaaaatccatttttatttgtgacatttcacgcatcaccgtacggtccagtacacgtgcataatgacgggtcatctggacattggtatggcctaacatcttagcaacgctctctatcgagacaccattggccagagcaaatgtggcaaaagtatgcctcgcaacgtgggtggtcaatgttttttttatgccacaaatatcagccagttccttgagataggcattcattttttgattacaaagcactggaaaaagtacaccatgtttcctgcaatattcattggtggaatatttctccaatatttttaacggaatttccatcaatgggatgttacacatgattttggttttctgccttcccttgcgtatccatctgacaccgttcgagtcctccacgatatgctcctttcccaatccgtgaatatccgagaaggccagaccggtgaagcaacagaacacaaaaatgtcccgtacctgacccagccgcggaatatcaatctcctttgaaatcagttttcggatttccgaatcttccaagaagtccggctccaccttatccaacgagaacctgatttccaaaaacggatcattcttcatccatcccttggccaaagcgatacggataatcttcttgaagttcttcagatacttggtggctgtattatgacaacactttttcgaggtcttaagccaaaactcgtaatcctcaacaaactggcgggaaacttcatccaaaagaatatctttcttatgatatgtctcccagacaaaatcctgagtatgcttcaaggatgtctcataacgctgcacggttgcaggcgccatgtccgtaccggacaatcgggcgcatttatcattatgttcacggaaaacctcaaacagggtacgctgtacgggagcatccttacccaaaaaacggtccaggacactgccggcagaaaccgctacaccttctatttccagttcacgctgaattttcattatcctcaaacggatagaatcaagatacagattcagttccttgtactcacgcttcttttccagggcctttccttttgccacactccagaattccggaagaattgttttcttcactgaagcatcaacccgaactccattcactgtaattctcatcattatcggagcctcaccgttccgattcaatttcgtcctacgaatgtagaacaatagacaaaatgttgttctttccatcttacttgttttttaatcacaaaactaaaattccaagagcaacaagtcaagatgcaaaacactgataaacagcgaattattcacttaataggtgtacctgacattgaaggagatcaggtacaccgaatagtacaccgaaagaatgctttgatatgcttatttttgccatgcatcaaaaacaaaaaatccccgtaaagtattaatttacagggattttctttgttttgcaattctttccagcggagagacagggaaacaaaagcgtttttacgctttttgcaacaagctgtattccaataagttaattcgctataaaaacgcatttttgctcatttttgtcgcagatatgtcgctcgacaaaacttctataacctctgaaaaccaacggattttggttattcaattaagattatttaacaatagtatctatatactcccttcaaatcagccaaacaatgcaataaaaaaatatttttccaacatacaccttttacggaatttattatgtagcggatgtagcggaactgattatcagcactttttgtatcatcatgggtatatatagatgtagcgaagttgtagcggagtgtagcggaatgtagcgaaggtatctatactatatatcctgaattcaaacagacaatgcaacagtgtcgaattcattgttagttaataatttatatttttcctttggggtcatgtaacccaatctttttctcggtcttgagtttaagatgttttgaacgcgcattacctgttcattggttatgtccctaaagtccgtacccttcgggaagtattgcctaatcaaaccattgctgttttcattggctcctctttcccacgagtggtatggttttgcaaagtaaacaaaaatatttagtttacgtgcaatttcttcgtgaaaactaaattcttttccattatctgccgttattgtatgtatttggtctctaaaaggttccaaggcatcgatggcagctttagttagcgggctggcatctttcccgctaagtagtcttatccatactagtccagttaccctgtcgtttatagttaatagtgctcctttgtgattcattccaatgactgtgtcaatttccaaatcaccaaaacgtactttcttgtctactatcgtaggacgcttgtctatgtccacgcggtttttgataaaaccacgtccattagtcaatgcacctctcttcttatgacttcttccccgtcttcttaaatgcttgtataacaacttatctccatgctttttatcttcccaaatatactggtagattgtctcatgagaaactgtttccaagccctttgttcgcataaacccagtcacttgttctggactgaaatctttctttatgagtatatctacttgaattttcaagtcgtccgtaaacttcacgaagtgctttcgtgaacgcattctggacatatacttagcctgagcgagatccggtttgtaaatgccattacgtttatcactattacgacgtaattcacgacttatagtgctacgatgaactcctacaagattggcaatctcggttcttgactttccgctttgcagataagcggaaatgttatacctttgttcttcggttagctgtttcatattgcaactgaatgttggggaactggaagatgcaaagaaacaacttttccacaggggaacaaaagggaaagaaatcttctttctctgttcctctgaaaaattattcttttcgtatcttctcattgtcatcattctcactcctgttgcattatccgcttgaacttaggtattataaatctatagtaattgattcttaacacctttttataactcctattcctctttcttgcccatcaaagtctgaatcagcaaatctttggttgctaaggcatcattcttggcctttactatgtcttcaagagctttgatttctcttctcaatgcttcgttttcaagcataaggttcgtattgacagaaacattcccgacttggttattgttcccggacacattattccccttgaatgtatttccaactcggaagtaatccaagggcatatgaaagaagtctgccaatacttcaagttttgaaagcgtaatatctttcgtccgcttgaaatagctcaaagtctgcttactcctcttaaataaaagagtgagtaactcctgctgctgttctttagatagtccagcatagagattttctattagttccgtgttaagcataaaaattacgttaataatgcgctaattaatactaaatccctcaatttattgagcaaaatcacaacatgtacaataaattgagctatatttgcatacaaaaataatccatattttggataaatacaatatataaccatttaaacctttaaagacatgaccacaaaagagattgccttctattacaaaaaccttcctaacggagaaaaaggcagatttactgctcatatcagtttggaacttgggggttctcctcattcttggcagcaaaagttcctcaaatggttcaatgaagaaaaaatcatcccacctgccatagctacggctctttctttaatcattgagggcggtaagtggaaataaccatttctatcaacaaccaaaactatcaataatgattaaggacaaatacatagacttggtaaaatcccgagtggatatatgccaattggctgtagacttgcatcctgagacaactctcagaactgccggcccccaccgcaagaagtgttgctgcttttttcatagtgaaaaaacaccttccctgctacttgacagcacaatcaacagatacaagtgctttggttgcggaaagagtggtgacataatttcacttgtggaagagagcaatgggcttgacttcaatggagctatctgctttctgctgaaaatgtactgtcctgatgttgacattccctcaatatatgaaaaaaatatttctgaagatattgcgttacaaaaacaaaaagaaaccttttatgcgtacaacgagtatgcgtatgagttttttcgcggacaatatcaagcaaacacttctgaagccttagcttgccgacaatatgctgaacgagacaaaggtggtcgctgggatgaagcatactgccaaactataggtttaggatatagtccgctaaaaggaaatcaattcctttcgtttgccatatcaaagggattaaaaacagacattctcctgcaacttggtcttattgccgaagatgaaaaacaaccaggtaaatattacgatttttaccgtgggcgtttgatgattcctcaaagagacagatatggcagaatcctaaccttcacagcaagaagtattgattctcaatcctatatcaaatatctaaatggtaaagattgcctgatttacaagaaaaaccaaactatttttggtatagacgtagctttaaaggctgcacgtcaagccggaaaagtttatctcgtagaaggcgcaccggatgtaatgcgtttgcaatccattgggataggaaatgcaatagcgacattaggaggtacttggtcagaaactcagcttaatgaatttagtaaatttggatgcagcatttgctttattccagacaatgacgtacccaaagacggttctaaatttggtgtcggagatcagttcgttttcaaaaatgggaaaactgctttggaaatgggcttcaatgtttctgttcgtgaattgccaaccgctgaacacaaacaggatccagattcctatctgactgacctttcaaaatgggaaacattggaagaaaaagacttcatcctttggtatgcacaaaagcactttgaaacaaacccttccaatgaagacaaaataagcataatcaatgacgtatgtagtctgttagttcttgtcacctccgatgttcaacaaacatcaatcctaacggaattgaaggataagtacaagaaagcttctgtatggaaagcagccttagctgatgcagctcgcaaaagacaggaacttcgccgtcagcaagccttgaaaaaggatgatgagttgaaagggtttcatttcttcagaaaaggctaccactactatgatattgatgcacaaggccgtgagcgagattggactaatttcattattcgccccttgtttttaattgctgatgataagaaacctaccagaatctttgaattggaaaatgaaaacagagtaaaaaaaaccatagaattgcagcaagcagatgtaaccaagttagatagattcaaagaaaaaattgagggaaaaggaaactttctcttctttgaacgtcaggacaaatatgaattgtttaaagcctatatctatgagaagaccgaggaagcacagcgtgtagtacagatgggttggaataatttaggcgaaaaaggattttatgcgttttgcaatggaattatttatgagggaaaatggaaacccatagatgaatatggcataatccggcttgaaaacgagaatttctaccttccggccatgtcaaagttccacaagacaaataaaaccgcatttgtcaatgaacgaagatttatccatgaccccaaaatggatatagctccggagttatatttcaatatgcttcatgagctgtatggtgataacggaatcgttgcattttgtttctacattgcaaccctcttccgggacatcattactgatagcacacgctctttccctattctgaacatctacggaaaaaaaggaaccggaaagactgagtttgctcttttcttgatggctttgttccaaaacaatccagaggtcagcaaccttgaaagtacaacatattacgcaatgggtgagaaatgtgctgaagtcagcaatatgttagttcacttcgatgaatacaaaaattcgctgagcaacaaacacatagactttctcaaaggtgtatatgacaatgccggtcgttcaaagcgttcttctgacggtgaacatcgtgaagcaactaagattaactgcggtgtcctcattacaggacaagaaatgccaactgctgatattgcattattttcgcgtgtgattttcttggaatcacaaaagagtgaaagatcaaaggaggaaacagacaagtatcaaaagttcttgaagctcagaaatatgtgtcctacaaacataactgttggattaatgcgctatcgggaaaatttcaatgcagggtggtatgacgcttggaaaagatcactgagagaaattaaaagtgaagtagattacaatgtaatcggagaaagattcatcaataattgggctatgatgcttgcctcatattattgtctgaaatcttttgcccccggcttgccatttacagaacaacaagttcatgacatttgcattgatggacttctctatcagcattctctttgcagcagcactgacgaaattgcagtattctggtctatgttttcaaaggctcgtcaattgggtgaaattcgtgaaggacaagactataagatttcacagataagcagtttgaaggtaagcattaaaagtgatccccaaaaaacctatgagtttaatgaaccaacctacattttatttgtccgggaaaagatttgtttggccaaagccaatatccaagccaagagagagggaaagataatgattccagacgaaagtctcctatcctacctcatatctacaccggattacttaggcaaaaccaaatcacccttaaaattctatatattggacgaaaatgggaaccctacaaaaagatacaaagatagtggcgaaagtgaattagtctatgatcaggaacgagtactggcatttgactattgcagcattgccaagaactacgatttaagccttcaacttctaactgagaaaagataataaactaaagtaattatgaacaagaaaatttttcccctcttcttcattgtagaacgtgtcaataaaggctatgttctcacttttaaaaacaatgattccatggaaatcacgaaagaagtggttctggaatccaatatcaacactcgcattggcgaattgctttcattggaaactttgactaaaggccgaatcgcaaaattccatgtagaagccactgcagcagaccacatagtatcatcaaacgatcctgccaatttcgaacaaatggatgaactttttacagcaaaggtctgtttttataataacctaagtcaggacattaaagatggcagcacattggttttacaagacaaagatgacaacctcaatgaaatcttcggagaaaacgcaaaagaagttgcattaaaacacgagctgcctttagcttacaagaatgatattgcgtcaatatcattccccacgaccaaggaaggacagaaatccttggcacaatgtattcagcgagtcaaacttgttgcatttacccatcaggagttactccaatggtaccacagcaacaaattataaagaggagttttccccactacattaaggaactttctcgtatcaaaatatcaagcaaaatcctcattttttcaacctcaaaaatcaatatttgtatgaataccaaaattattgcagttgcaaatcacaaaggcggtgtaggtaaaacaacaacagtagccagtcttggaagcattctcagcaaaaaaggatataaagtcctactcatcgaccttgatgctcagtctaacctcactacgtccttatctgcacctacggaaggtcctactatctatgatgcacttaccggtaaagtagaagaacttcctatcgtttcgctcaatgaaaatctgcacttggttcctgcttctttgaccttggcaatggttgatgtggaactttccacagcgatagcaagagaaagaatcctatcagatgtcctacaaaaagcaaaggtagaggaaaaatacgacttcgtattcctcgactgccccccatctttagggcttatgacactgaatgcgtttaccgcatcaacagatattgttattcctcttatctcagaagtgttaccctttaaaggtttaacgatgattaatgatttcatcaatatggttagtacaaggctgaacccgaaggctcacatttccggcattctcattactcgttgggaaacaagcaatctttcacgcggtattgaagccaaattacgcgaaacagttggtgatactgtattccaaacaaaaattcgcaagaatgtacgcttggccgaagccccattggaacgacaagacattcttgactatgataagaatagcaatggagctaaagactatgcagcttttacggacgagtttttagctcacatacaataaccctaataagaaaaaagcatgaacaatacaagcttagatgctttattctcaggcttgacgaaaaatgaacctacagaaaaacaagagacacctccgcaaccggaacctcctgtaataaaaaaatctgttgaacaaggcacagccagagagaagcaaaaagaaaaagagcgtgcaaagagtgaagaacgcttttgcaccatcgtttcttccgagttgttaaaaaaaataagaatcatcgccaagagagaaggcttgcctattaaagacattgtatcagcagctttcgagaaggccatagacctctatgagcaaaagcatggtgaggtttttgaaaatcaaaagaagaacgcaaaagaattattttaacaaaaacaaacttggtgtccacttttaaagacatgcaatacaaaaacctttgaggtgggcacctttaaaaaaccaattatgaaaaaatatatcaatgttggctttatggccatttttacgctgatgacattcgttttgagctttagcagctgttcaagtgaagatgatgacattatgagtgaatatcccccagaagaaaagccggaagttccccactacgacaatctttcctatatgccaggagccaatgtgcaactgattaacaaggccgagtactgcaaatccatcattgccgatggaaaggaacttattaccggtaatgaaagtggagtaatcactgtgccgggactcaaagaccccaaggtttacatcaccttcaaagaaggtattacgaatttctcggatgtattcttaggctgtaccaagttaacgagtgttcctgccaatctctttgcaaaccatcccaatgccactagtttttcaggagccttccttcgttgtacagctctgactgccattccggaagatttgtttgcaaacaatcaagcagcagagaactttgcatggctgttttacaattgccgtaaattagagtccatcccagagaaattgtttgcaaactgcccggcagttactgatttttcaagtagctttgctgcatgcaaaaggttagtttcaataccctctgctctttttgctcacaacccgaacgtcaccgatttcagttatgccttttccgattgcagtttcataacctctattccggccagtctctttgacaacaaccgtaagatagaagtattttcaggccttttttccaactgtacatcattgaaaggagaatcaccttatacggtagtagaagggaaaaaagtacatctgtacgaacgagaactctatcctgaactctttgaagaacccggattgcatttcggggtattcgaatattgcaccggtctgacggactatgcaaatatgccttctgtttggcaaaaatttcaagattaaatcttcaatttgtacttataagcaataaagaattataaggtctcctatgtggtggaatttttccaccacatactttttcaggacctttaattttaaacaacacctaaatagcgcaaacgaaaaacatattgtaacaatagacttgaaaaaggtcgaataaaatacaccaatcatgaaaataggagacaaggttttgatttctccagacctgacccggatggaaggctggataacaggaacagtcatagaggttgaggacaacccctttatcggtattgtcatttccgccgaaacagaagacaaggatgtcttcttcggcaaggaagatttatttaaattcaatcaaacatcaacaattaaaattacaacaaaatgaaaagtaaatttcgcctgagctgcatggctatgttagctgcagcaacaatgagtggcagctttagcagctgttcaagtgacgagttgttggacggcaccaacactctccccgagaacgcgattgcgttcaacgtgacgcaacagggcgcattgagtcgtggtacggaaacgaactccgtagcatgacttcaatagtacatacgacatcaaaatcattggactatcctcttgtggatgaccgaccttgtgtcctaaaaagccgtggcaggaagaagcaggaaaaatctccgaagccactaaatctttagtttagcggtaattcacaagaacctacctacccacatttatgtaggtaggttcttatatttatatctaagctaaagcattgacgaaggaaggctaatgcgtagcattttttatttcccttttttatttattccctcataaatcattaaataaaaaccacttttgcctttcttgtagagatagtctttgtagagattcttgtaagattagatttattaacaaaatatcgactgattatcaagcatttcaagtcaaaaaaatacgagggaaaatacccaaaatactaaaatccaagaccaaaagatacccaaaatactaaattcagccttacctaaagaacccaaaatactaatcataccaataaaaaatgattattatttttccatgttatttttaatatatatatttgcatatcaatcacttatatctaaaacatagacttatcaagtctgcactcatttccaccttccctaaaactttgctgaatcccattcttagttcattgaaatcacatcactaaatctttttcaatcatgacaaatcacgattccctaaacttcaatcctccttccaaagaagaaatcatgctgatacagcccaataatgtaacttttgggcaatacaatgtgacagactggcaagaaaatcttctaactttgattggcgacaatatccaaaagcacatgagccgtgagcaagaattgccgcgagatttgtttaatcaaccctatgttactatatcttgtgatgaagcaggaggtaaaaacaataaaaagaaagtatataaagaagctctggacttaaccaagaaactattttcattcagatggcttcatcctcgcattcatcagacaatagagacaacaggcgttgtcattacaaccatacatgatataaagaacacgaataaaataactatcaacatcaatccctgggccataccatttttgatttattatggagtcggtgtaggcggcacgcggttttcaaaatccatagcattgagtttaagaggcaattacaccaagaggatatataaaattatttgcagccaacatgatcgaagagaatattattatcctattgaacagtttagaacagacttgggtatttcagaagtctattcgaactctcagatagaccaaaaaattcttcgtcccagtcagcagagaattaaagaaagcgaatccgaaatatggtttgactacaaactcatttgcaagaatcccataaaaggcagaaaaccgaaagctgatacaattgtttttaccatcaacacccttcatccacgacaggaaaaaggagaccaattctcgcaatatacctatgtgtacagatgggtgtttaatgcaatgggctatccggtagacaatgcggcccaattagccgttgataagattgttgaaaccggcaagctaaaggaagtttatgaccgctgctgcttctatgatgaccaaatattcaccggtgataaaaccagagaccatgctcaaaatgcccttatgaaaatgttacgcgaagaatttgggataaaacgaagttaagtcttccaccctgtaaaataccatatattctcttagtcaacccttcatctaaccagaatctatatacttgattagcagcattttggtttcattatatagttaaaatagaaccaaaaaaaaattattgcttcaaaaatggtttttccgtagtcttaattcctttggaacaaaaataactatgtaattttgtcatgaaaatcaattgtgaataactacaaaataataaaaaatgagtccattttcgatttatgcaatagttctaaccattgcacttattctttactacatcacgctcattacaatggatttgaatgcaaagaataagaaggataataagaatgaactaaccatagcttcgggcgacgacactgaagaagatgatgaagaatacactccgcaaagtgttgttgaaacgtcttcaggcagctttagttttgtaaataatacagaagacccgaaagaaaatgaagagattcaggaagcacctgaagaaatcacatatcagaaagaatctggaaaagatgagttaaaagaggaacataaagactcggaaaatcaagattcagaatcagaagtacaaaatcaagaagaggataaagcaaccgatcagcaagagacaacacaaccgcaagaatcagatatagatagtgaagctaaggatgctgaaaaatcttctgaagaagaatcggcaaattcagaggaagaaaactcaatgtttcaagctgaagatattagctccgtttttggcaaagaaactcctcgaaaagatttgagtaattctgaattattcgatgagaatctaagaactaccaagtatacagttaataaaacatttgccccaaagccttccaaaaatgtgactgaaattcttgatactatcaacaactcattagaaaatgttcaactattccaaaatggattgatgactccagaggaattgactaaaatggtgagagaaaataaggaaaattgtaatattgagagacatgatgaaattacaatgttataatacaaagttactctgcctgttttttttcatggccatattcattcccctgacagtttcagcaaggtgtggtgctgttaattactcattgggtgcccagcaacttcataatgcagctgtttttgtaggaacaatgacaaagtatgccgtagaattgctaaatgccgtagctgctatcctttccataatttcagctttgcaaattgcaataaagatgaattatcacgaaggcgatataacaaagagtgtggtcatgttgataggttcactgctttttctaattggtgcggcaactgtgatgccagcattttttggttacgagaatttgagttttggaatcaaataaactgataaaattttattcaccctaaataactttttaaacacaatgaacttcaaaaaaatctggagtacagcgaaagcaaaaaattcgaatgctgcttttactgtaaaagttgcagttttaactgcgtgtatcaaaattcttactcctgctactgccttcgcgcaagactacgcatcaggaacaacagcattaggagatgttaccaacgaacttaaaaaatatatccctattgtaacaaacctgtgctacgcacttgccggtattgtggccatcatcggtgccatttccgtgtacattgccatgaataacgaggagcaggatgtcaagaagaagatcatgatgaccgtaggatcttgcatcttcctcatcgcagctgctaaggctttacctgcattcttcggtgtaggtggataattctatcatctaatggctgaaccaaacaatccagaatttcaaatgttcaaagggcttcaacgccctttggaatttttgggtcttcaaggacgttatattgtctgggccgctattacagcaggaataagtcttctcggatttattataacatacaccctcttaggctttatggtcggactgattgtattagtaatagcagtgagtactggtgttggaatcatcatgattaaacagcgaaagggtttatattcgaaaaagaatccaaaaggtgtttttatttatgcctacagtgagcgactttaaaaccttttccaagttacgaaaatgaaaacgacttaggtaggcttagctttaaggttgagcctactttttttttaaagtactacaactaaagaaatagataatgttagtatatgtattgttgtgttttgctgccatctgtataggtatggctatttcagtgcgagcatttggcaccggcagcaaaaaagctaaaatctttaaggaaatctacttttcgatagaggaagtagacggtatcggtgtgtactatacaaaaaccggagaattttctgcaactgtaaaaatcgtaaatcctgtacagaaatactgtgctgacattaacgagtattattccttctccagtttgctcacctctttgatgtctacattaggcgaaggatatgcgattcacaaacaagatgtattcgtccgtaaaggtttcgaggccgaaggtggaaacaaagagtttttaagtgaaagttatttccgctattttggtggtcgagaatataccgattgcattacttacctcaccataactcaggagaataagaaaagccgtttgatgagttatgacaataaaaaatggcaagattttcaagtaaaactcggcaaagtacaagatcaactccgggacagaggcattgacgctcattatcttaataaaaaagaagccaagcgattcatcaatcaatattatacccaaaactacacacaaaagaatctgagtcacaacaactacaaagtgacggacgaatatattggtattggttccaaaaaattcaagatttacagcttagtagatgttgactgcatagtcgttccggaactaatcaagccttatacaaatatagatgtcaacaatgtcactatgccggtagatttgatgtctatgttagacagcattcctgattctgtaaatgtagttttcaatcaaatcatttttctacctaatcaaagacaggaattatcaaaactggcaaagaaaaagaaccgtcatagttccttgccaaatccaagcaatgaaattgcagtggaagatataaagaaggtagaagaacttactgctcgtgagaacaagcaactgttttattgtcactacaatatagtgattaccgttgataataataccgatttgcaaaaagtaacgaataacttagagaatacttttagccgtattggtattcagatttctcagcactcttacaatcaacttgaactattcgtaggcagtttcccgggaaactgttactctatgaataaagaatatgaccgttttcttacattaagcgatgcagcatcctgcttaatgtacaaggaaaaacttccaaagagtgaagacaccccattaaaggtttactatacagaccgccagggcgtgccagtagctattgacatttccggaaaagagggtaaaattaaattaaccgacaactcgaactttttctgtcttggtccctccggttccggtaaatccttccacatgaactccgttgttcgtcaactttgggaacaaggaacagacgtagttatggtagatacaggtaactcctatgaaggtttatgcgaatatgtaggtggcaaatatatcagctatacagaagagcatcctatcacaatgaatccattccaaatcaataaagaggaattgaatgttgagaaagttgacttcttgaaaaatctgattatgctcatttggaagggtaactctgctatacccaccaaaattgaagagttgctgatagaacaagttatcaaagaatattatgaagcttatttcgtaggattcaacggctataacaagactcaaattgaagccctccataaaaaactattgatagatacggccactgagagacgcatttcagacacaaatgaagacgtggaaaagcgtatatgggataaaattcatgaaatggaagcccgtagaaaagctcttatcgtgaaagaactctcattcaacagtttcttcgaatacagtaccgaacgcataccctacatctgcaacgaaaataagattacaggtattgatatatcgtcttacaattattcactttctgaattttatcgtggtggttcatacgaacgcacgctgaatgaaaacttagacagcagtttgtttgatgaaaccttcatagtctttgaaattgatacgattaaagataataagactctgttccctcttgtaacgctcattatcatggacgtattcatccagaaaatgcgaatcaaaaaaaatcgcaaagtccttgtgattgaagaggcatggaaagcagtagcatctcccatgatggcagaatacatcaaatatttgtacaaaacagcccgaaaattttgggcaatggttggtgtcgttactcaggagttgcaggatattatcggtagtcctattgtaaaagaagctatcatcaataattcagacgtgacaattttattggatcaaggtaaattcaaggaacgatttgatcaaattcaatccgttttaggtctgactgatatagaatgcaagaagatatttacaatcaaccgattggataataaagatggaagaagtttcttccgtgaggtattcatacggcgcggactggcaagtgatgtctatggagtcgaagaacccagagaatgttatatgacctacactaccgaacgagccgagaaagaagcattgaaactctataaatcagagcttaaatgcagccaccaggaagctattgaaatgtattgccgcgactggaatctatccggtatcagcaaatctttggcttttgctcaaaaggtaaatcaaactgggcatgtactgaatttaaaacaaaaataaaagcaatatgagacgttttatactaattacaattctggcaatcgcctattgttttccttttcaagctcaaaatatcaatgttgacaaggagactttagctgcaatggaaatcgcttttcaaaccaattctttgatagaatcacagcataatcaaaaccttctaaagattcgtcaaagctataagggagcagaagttgcagctgccggaatttattttgtaaaacatctcgacagaaaggctttgaccaatgttaatatatggagttccgatgaaaactattattataaacgaatttataatatagtgagtagaggtattattcccaaaacaatagatgtagccaagttgatggtaaaggatccatcaacggctatctattggggaagttatcttgtaaaaacaacgcaagatgtaaaatccttatgtcaacaatttgagagtgtagttaccaatggtaaactatcttttaaggaccttccattcttagaaattgccgaccagttcaaacaagtatttgatattaccaaattaggagaagttgattggaaaactacttttgaagccatctctgatgatattcaaaacagttttactaaagagaacttcatggctgatattgagaaccttgttgttaaaggagctgctttagctgcatcaggtttcaatagcaacttgaataaactacttcaaggaacaagttttggtggtacattccaagacaagataggtgatattattacactggcaggaaatgcaaacgatatgttttcaaacatgaaagacaaatcagccttagaaattgtcaatcaatttgccggaaaggataatattgaggatcttttcgatttgagtgactataacacaactcaatgggctgatgattttacatctgctgccaatggtcaattctacactcaaagagtttatatctatcgtgaagaaaagagtacggatttgatatgtgattataaagcaccaacagatcaaagtagtgtccttaaaagcgatcactggtatagatttttccctaaaaagagcgaaaacttctttcccaatgaaagtcagcaggaagatattctccgtaattctgaaaatcaagccggatggagccgaaaaaaagtggagcaattgaatcaagaaaatataggaaaaggatatagatatgaatttttcaagaatctcaatgagaaaatcatagaaataaaagatcctattattagccgcgtttttatcataaaagcgtatgcttatgacatacaagtctataaatatactgacattaaagaagttgtttatgaagaaatcttcgacagttataaaatggacaggaatacctttatggctatgatgaatgctcggttagagcaatacaatctgaatggcgatcatacagatataagtaatcccgatgatttgaacaatcctgaaccggaaaaaaattacacctacaaaataggttacgatgaaagaaaatattatgaagctacaactgaccgggacatccaaggagccagttctgcaactttccttgtaacctgtagtgacggtggtgtattaggcaaaggtagtacttcctacaaatgccgtagctgtggaaaaaccgtaaatgatcataccagacaatgtgcaatgaaaaccactttaggtaacgaaaccgaaattaccgagaatattgccgagttaaaaaaacaagccgagagtatgagaagtgaagcgaatgtacttcaaaaagaattggatgagttaaataaagaatatgaccagattcgaagaaaactcaattcagccacaacgactgaagaacgtgacaaataccgcgagcagctaaacaaaatacaggaaaccatcaaagaaaaacaattgaaatatgatggactacgacattccattaccagtgtagaacaagccataatagaagcagaagaaggtgaacaagtacaaactgacgactacaatcgtattccacaaattatgaaaagcatgaaaagtgcttatgaaatagcttggtctgaagaaggccattgggaaggtgatagctttatccggaaaggaacaatgggtggcaaggatttcagcgatgtcacgttcaaagctaccgtgaagatagcccgaaagcccaaatactttttaggtatcaaaattcaccgtgccatcgtccaaatagactgggaattaacaagtagttggagcgaaactaccattgcggaagaaatggatcttgaccccaatcgtccagaagcagaaaacagcaagctggtaaatgacaaactcagtcaattggctcagcaacatccaaattgcgaagtaacggttgaactatacaaaacacctgaagttgaaaaagacgatactccagatgtgaaacaccttttatgggcaagtgaccgtttggatatagcaagagatattgaagcacgtctttcagatatacatacgcagttggtactcattgaaaaattcctgcattacaaatacacggtcaaagattggtttttgagttttatccccaagctcaatgctgacaaggacagaaaattgaatattgcagaacaatgccataaaagatggatgattactggcggtgtaaaacccgatgcagccactacacaaattcaaaattaaaaccacaatatgaaactaaaagaatcaaagggaataaaaaacaagaagcatcttttgcctttcaaggttattcttatgctattgctttattttgtctcctctaatactataaaagcccagttggtaccagatgttgctaccattgaagcatacatccgtgaccacaaaaagcaacgcgctattctttatgcacgcagtgttttggaagaaagcaataaattacttcacaaaaccagtgctgcaacaaataggaactacaaagacataaatgtagaattagacaaatacgaaagagcttttgatgtccttgacttagtgctaagttctgtacagacaggcttcggagtatataaaacttgcgatgtagtaaaggataagcttggcaaatatgaaaaacttatcaaggaatacaaagataaggttttacttcgaggtaaaatagaatctgcagacactttgctgctaactgttaatgcaagggctataaaaaatatacaaactgaggtcaagaacatttggcaagattttgtgattataggaggttatgcaagcggacaagtgaattgcacgactgctacattgacattcattgtagagtctattgcaaactctctgcaaaaaatccaagatatagtaaacaatgcctactttcgtacatggcagttcattcaagtgagaacctgctattggaaatcagctctataccgttcaaaaaccataaaacagatagctacagatgctattgaaaaatggatggagaatgggaatataatcggttattaaacagcaaaaaaaatgaaaagagttatttgttccctattattccttttgcctattataggtacgaaggtaacagctcagagtatgacgtacttgcctgatgtagcaaaacgaaatcaaattcaagtgatggagttaggggcaggcgttttgactcctgacttttactataatatgtttcataaaaattacaagaagacagcataccttccaacttctcctaagaactcattgcgtatgacgacctatttaagttcgaaaccacaggtagaatttgctgatagcatagaagcagatttaaagtcaagggcaaagatagaagcgttgaatttggctgatagagaagttgatttggcatggacttcaatcggtaataaactggataatacattaagaaagtatagaaataacatcaacagtctcagtggaaagacaaagaatgatgaaatagaagaatggaaatctcttgcagatcagtatgattttgctattaaaaccatcaaaaaggcatatttggcaaattctcaacgccaaaaacaatatatgaccatttatgatgaaatctgcaaaaccaatgaactgctcgtggatcgagtaaaaactctgactttgaaaaaagcagccaatagagtcttgaatgtgatgtcttccaatatctctcacagagtcaaggaagaatcacttgccggttacaacagatggattggagtgactgataaaattcaaactaaaacgacaactcaaaaatagaaaaatatgacgaatgacagcacagccgtagatttcggcattaaccttcttgaaagtgaaattgacgatgtgatctttcgcacaaacgagtttctcacgagtgaaacactgattggttcacaaggcccgttttggtacattcttcagatttcaatgggtttaggcggactctttgccattatcatgtgtgcaaatatggcgtacaaaatgatgattaaaaaagaacctttagacatcatgaaactattcaagccactagcaattagcattatactttgttggtggtacccaccgcaaataaccggaataggtaacaaaagtacaaattggtgtgtactggattttttagcttatgttcccaacgctattggatcttatacccatgatttatatgaagctgaagcagcccaggttgaagatagaatggaagatgtgcaacagcttatgtttcaactgggagaaaaaacttccgacccgatagctacaatcgcgcaagctcgggaaaagttaggacagttattgactcaatcagcagtacaagagaccacggatatagatgctgcgacacaagatgaaaagaatgtttacaaggccagtcttgtttcgacttcagccggaactgtgatgctgctcgataaagtcattatgcttatagcactgattacttaccgaataggatggtggggaactatatactgccaacaaattctcttgggtgtattaactatattcggtccaatccaatgggctttttctattctacccaaatgggaaggagcttgggctaaatggattatcaggtatttaacagtgcatttctacggagccatgctgtacttcgtaggcttctatgtacttctcctgttcgatatagttatcaatatccaatacaacgatttggcagctgttacggcaaatcaggaaactgctacggcctatctccaaaactcattttttacagccggttatctgatggcagcatctgtcgtatcacttaaatgtcttagcttggtgccggatcttgcagcatggatggtaccggaaggagaaacttcattctccgcacgttcatttggcgaaggtgtaagtactacgatgagtagtcatatttcaagaagaattggtatttaatttcaaaataaatagtttatggtaatcaaaaatttagaaaataagattaagcttgtacttataatatgcagccttttcttagttggctgtactattatatcattaggaagtatttggactgcaaagacaatggtcaatgatgcgcagaagaaaatctatgtattggatggtacggttcctattttagtaaatcgctcaacaatggaagaaaccttggatgtggaagccaagagccatgtggaaatgtttcatcacctctttttcaccctggctcctgatgacaagtatatcaaatataccatggaaaaagccatgtatttgattgatgagtccggattggcacaatacaatgctctgaaagaaaaaggtttctatgggaatgtaatggcttcaagtgcagtattcagtatctattgtgacagcgtgaagttcaacaaaaaagatatgtctttcacttattacggaagacagcgcattgaaaggcgaacttcaatcctgatgcgtgaacttgttacagaaggttatcttaaacgtgtaccaagaactgaaaataatcctcacggactgcttatcgtcaactggcgcacaaccctgaacaaagatattgaacaacgtacaaaatccaactattaaattatgaaaataaaaaaaatgctattgggcgaagatatgcctgataagaatgacccgaaatacaaggaactacatgaacagagttttaatgcaggagccagttttgcaagaaaaacgaaactggatgtctttgctttaaaagttcaaacctttgcaagttcgtatcctaaaatattcttagggattattttcagcattgtactgttttgtataggattaaacctttatagattatcaaccgctgtaaatatgcctaaaactcgttccagtgtcattcaaacgcaagaacagtatttgaagttaaaacgtcaccataaccctcaaaacagttcggatgccgtttcggaatctcaggaccctgttttagaataacaacctcagtagaatatgaatataacagataaaataaacttccggcaacctaaatatgtactgccggccattgtgtatttaccccttctgtttaccggatatttcgtctgtgattttttcaatttaaaaccagttgaaacaagtaagatggaaacgacaaattattataatgacaaacttccatctgctaatatcaaaggagatggtatcggtcagaaatatcagaatatggtcgaaaactttggtaaaatcaaagatggttcagctgttgaaaatattgaaggaagaactgaaaaggaaaaagaaaaatacgaatctcaatatagtgacgcggaactggcagcaatggattctaccagtgaatcatccaaaaacacgaccgaacagattgaggaaatcaagaataggattcataatcagcaaaagaaagatgaatcccttagttcttcggatctaagcgaagatgagcggaagctccttgaacttcgtaaagccttggaagaagcccaaaaagaagaaaaaaacacttcctcagaggaagtaaatgatgacgaactttctgaggcagcacgaaaaatcaagtcctctatgcaaagaaaccaatctaaggacaaagaagatgaagtcatagaaaccaatgtcaatgcggtcaaaagcttggatgaaaatgacaaaacggaagaagtcgtaaagaagcatgatgaagcttcagattatttcaataccatcaataacaacgaacctgaccacaaattgatcaaggccatcgttgatgaagatataaaagcagttgatggaagcagagtcagacttcgcttgcttgatgacattgatataggtgagcgtactatccgcaaaggaagctacctttactgtaccatgagtggattcggccaacagcgtgtcaagggcaatgttaccagtgtactcttcaatgatgaattggtaaaaatcaacctgagtatctatgatatggacggtcttgaaggtttgtatgtacccagaagttcattcagagagaccaccaaagacatcagtggtggagctttagatcaaagcatgaatttcaatagtaccacaagtgataatactttttcacaatggggaatgcaagcccttcagaatgcgtatcagaaaacaaccagtgcgctctcgaagaatattcgaaagaacaaagtgaaaattaaatatgggacccaagtatatctcatcaattcaaaaaatattaaaaactaataaataatagaacattatgaaactacataaagtattcttagctgccgtagcttgcattcttttttcactccaggcttttgctcaaaaatgtttgaacgagatgcctcttattacggttaatgaaaacgtgacgactgtaataaccgcctcggaacctgtccgctttgtcgacatcagcacacacaaggtagtaggtgatcagcctatcaataacaccgttcgattaaaacctaaagaaggggtagaagtaaatcgggatggtgacatccttgccattgttaccattgttaccgaacgctatcggactcaatatggcttgatttatacatccaaagttgaagaagctgtagctgataaaaccatagaagttaatgaacgtacagcttataacaacccggcagtaagtatgtctactgaagatatggttcgctatgcccgacaaatttggacttcaccggcacgttacagaaatgtggccaccaaaaataacaaaatggtcatgcgcttaaacaacgtctatagtgttggggaatatttcttcttggatttctcgatagagaacaagacaaacatccgtttcgacatagaccagctccgactgaaattgaatgataaaaaaacatctaaagccacgaatgttcagaccatagaattaactccttcccttgttttagacaacacggagtcttttctgaaagggtatcgcaatgtaatcgttgtaaaaaaactgactttccccaatgataaggtactgactattgaaatgagtgagaaacaaatcagtggacgaacaatcagtcttaatattgactatgaagatgtattgggagcagattcgttcagcaaattattattatatgaaaactaaataataagtatatgaagaatattaaaatcttattcttatttctgtgtctctcattcatttctacggaaatgaatgctcaggccaacagtaatcgaatatcattaggcataggagcattatacgaaagaggttttgattttacaattggagttgaacatgaaacaaagcatcacaatgcctgggagtattttgccaacggctatattaaatatgcaaaagaccctcgtgtaggacatattaccaaagattccttttggaaacactaccggacttggggagtcggtgctgcctataaaccttgtgttgtacgcggtaaaaaccattatggaaacattcggtttggaggaagtatcggtagcgacacccacgaatttttaggatgggttcatgccggttatgaacacaattattctcttcgaaaaggatggcaaatctattggcaagtaaaaactgacctttgtatcaatggcaaggatttattccggacaggaatagtacttggctttaaaatacccacttcaaactaagtaatatgaagaattttaaattatcaattacaggcatactttgtatgataataacgctcctctcctcttgtgataatcacgtctttgaagatgaaacgtggcatcgttggagacccggcatgatttactgtacaaatggagaaattaatacctatgaagaagtactcagcaaagggaatactcctgaagctgtaatcttctatgtagatcatgatgacaaaatagatggtacagcctacgccgtttgtataaaagaacataacccttgggctttttctgacccggacacgacctatgttgagcaaggcacatccgctgatatatctacatttgatggtgagaaaaataccactgcaatgagaagtaaggacataagttctccacttgcagaatctctgaatccaaagtattttatcccttcagttgctgaaatgtatcaattatatttagcaagagatattgtcaatcctatcattatcaattgtgagggagatccaatccccatagacaaggaagactgttggtattggaccagtacagaatgtgcaggagcaaattcagatagagcttggcgttacagtttaagtgctggccggtttgaaagtgcagacaaacatcaatcttttgcctcacgccctatcctgacaattaggttaaaccatgaagaagaataaaaaatggatgaaagtaaggatttacaatcactatacaaaatatttagaatactcatctatgtagccattttaattgaattttttgaatacgctattaatccggcttcattaaatttttggaatggttttttgttcgatatatatagtcgaattaaaacctggggagtatatcaagatggtcacatgatttacagtaaggtaatgaccttattgataatctgtgtaacttgcatcggaactaaaaacaaaaaacatctggaatttaatgccaagaagatggtgatttaccccatctccttcggtttaattctgatgttcttgtccgtatgggtttttaaacaacggtggtctccctcgttcttttcattacccctaagcacatggatatattttcttatgagtattgtaggggccattctttgccaagttgcattagataacatttccaagttcttgaaagatggattattaaaagaccgattcaactttgagaatgagagtttttcgcaaatggaagagaaggtagaaaacaaatactctgtcaatattcctatgcgttactactacaaaggaaaatttcgcaaaggatgggtaaatataatcaatccattccgaggaacatgggttgtcggaactcccggttccggtaagacattctctatcatagaaccgtttatccggcagcactccgcaaaaggtttttcgatggtagtttatgactacaagttcccgacattggctcagaaactatactaccattatagaattaacaagaaagcaggaaggacacccaaaaattgtcagttcaacattatcaactttgttaatgtagaatacagtaggcgcgtaaatcctattcagctaaaatacatatccaatcttgcagcagcgagtgaaacagctgaaacacttcttgaatccttgcaaaaaggtaaaaaagaaggtggtggcggtagtgatcagttctttcagacctctgctgtcaacttcttagctgcttgcatctactttttctgcaattacgaaaagagaccttatgatgcgaatggtaatgaaatgaacttcgacaagaccattgaccccgagaccggtatgataaagccaaccggagttgtgcgtgataccaatggcaacatagcacaacctgcctattggttagggaaatactctgatatgccccatatcctttctttcttaaatgaaagctacgatacgatctttgaagtcttgaaaaccgatacagaagtagccccacttttaggtccattccaaacagcttttgaaaacaaagcaatggaacagttggaaggtatgattggtacgcttcgcgtatttacttcacgtctggcaaccaaagaatcatattggatttttagcaaagacggtgacgattttgacctcaaagtcagtgaccccaagaatccatcctatcttctgattgccaatgaccctgaaatggaaagcatcattggagctttgaatgcactaatcttaaaccgtcttgttactcgtgtcaacacaggacaaggaaaaaacattccagtaagcatcattgtggatgagttacctacattatacttccacaagattgaccgtcttatcggcacagcacgaagcaataaagtgagtgtagctctcggttttcaagaactaccgcaattggaagcagactatggcaagaccggtatgcagaaaatcatcacaaccgttggtaatgtagtcagtggttctgcacgagccaaagaaaccttggaatggttatccaatgacatatttggaaaggtcgtccaactgaaaaaaggtataacgattgacagagacaaaacctctatcaacttgaatgaaaacctcgattctttggtccccggctccaaaattgcagatatgccaaccggttggatttgtggtcaaaccgcccgagattttgtgaagaccaaaacaggacgtggtgatagtatggatattcaagagtctgaagaatttcagaccagtaaattctactgcaaaacaaatttcgatatggataacattagcaaagaagaaaaagactatgccaattatccaatccctaagttttatcactttgaatctcctgaagcacgcgaaagaatcctatatggaaacttcttgaaaatcaacaaagaggtcaaagacatgattgctgaaattcaagaatttaacaaaaaataaaagggaataaaatcgcatcaggagactcccaatattctgacaatggtttccctttaaaatacagtacttgaatacgttacaaatttaagttttttataacttgattctgttacatattcaagtattttttgtatctttgcatataataattaagaaatatggaaactaacaagaaaaatactcatggaggccgaaggataggtgccggtcgaaaaggcaaactcggaacgccaacgtctgtcattcgtgttccctcttatcggaaacgtaatatacaaatagaagtagacatgttccattcttctgtaaaagagaagccatacaactactcagcttctgaaatctacgaagtcgtaagcgacctcattttcttattaaggagttttcaatatcgcataaaagaagggaaaataaagggattagaagaattaactccttttcaacggtatgaacttcttaatataaattcaagattcaaagactaaagacactatgggaaaatacaaagtaatcatagccggttgtcgtgatttctccaactacgcgctgttggccgagaaatgcgattactaccttcatgacaagatacagacgcatgaagtcatcatcgtttcaggtcatgccaaaggtgcagataccctgggtgaaaaatacgcacaggaacgaggattaaatatcgagctgcaccctgcagactggcatagtcatggacgagcagccggacccatccggaacgcggaaatggctgctgaagctgatgctctcattgcattttgggatggtcaaagccgtggaacggctaacatgatcaaaatcgccaaagacaaaggacttcaagtagcagtggttaaatattaaataaaaaaacccaagcaagatttagctcttgcctggggttttatttacttcttaatttcaaccaattgaatctctaatcctaattgttcacataacttatccaagatttcgatactgatattatatgtacctctttcaagttttccaatattagcaaaacttattcctgatttttcagccaattgtctggtcgataatcctctatgatttctaacttttgcgattctgattccaattctttcttttacatccatgaaatgctgactgtcaataatttcgtcattaactatttctacatttcctttcaatgaaacctctccctctacaatagcattacttttaatcatagtgtttcctttaatccaagcgttatctcttaccatagcgttctcaccaatctgtacataatcttgtacgatacttttcccttctatttttgcattccctgatataacagatttatcgcgtacaattgcacttcctttaacgactgcatcatccatcactattgcactaccggaaatttttgcttcttcatttacaaaactcataccttttatagttgcacgatcttcaactaccgaatttcctgctaccaaggcttcgtcttgaacctgagcataattttgaatcacggcattatctcttactattgcgcgatccataactgaagcataatctcctattttggcattgttcattattaccgcagagtcttttacaatagctgattgagatattttggcatcatcacagactaccgcttcatcatatacaaagcagtttccatcgtgtgagaggttgctttctttttcaatccacccaccgagctgcccggtcttcacatccccaaagtcccgaagagccttgatacgataaactgtacgctctgttccatcagacagcgcaaccatttttttctcatcagtaatatctattttttttcgcatatcaaacttctaaaataagctatttggcataatgtatctaattaagtacaaaattagcatttaaaattcatgtatgcaaaagcacacactatattttaacagattgtttaaaaatgcgcatagataacagcgcaaccacctatcgttaaatttcccgtaattcttgcgtaacctctaatgattatatcatccgtgactacggcatttccttggatataggctttatctgttacaagcacattaccttttacggtagccttactaataattcttgcacatccaaagattctcgctttgtcagagactaatcctttatcctgaacaataactcgatcattcaaaagagcatcattttctatcactgcttcattttttacaataacctttccaagcaacatgactctattttttacaatagcatcatcacgaacccttgcatcctcacagaccactgcatcatcatatataaagcagtttccttcatgagataaattttcttctttttccacgaacccaccgagctaaccaaccttaacagtctcaaagttgcgaagagaacgaatacggtaaactttaacctttactccattattcttcattattattttttcttctgtggtaatttcaaattttcgattcataattttgatgctgagatatattgcacgaataaaatcctcttactctttctatcaaatctaacaaattattgatttcaaactatagatagcagactctctactactgccatctggaattgaaacttctaagctatttaagtttagaccatctgttcaaatcaataatagttcataatcaaattattttgagtaccatgttaatagcattctccaaagcttcctcatactttttatatacaggatagccttcttttttaatatcgttttcaatccaatcgctttcttctgcactcacattcaaatcacagaaagaaatcgtccacttatgacccacaactggttctatccaaacataaattcctttcgtttctctcagccaattttgtgccatacaaagagtaggcgcagcgtattcatctacctgcaaccaatacttttttctttcctctttgtagaactccaatttatcatttttgtaaaaaagcgttgaataatgactatcaaatcctttttctttgagaagttttgccgtttccagagatacataagcctcattcataatcttgtagtgtttaatgttgtttgtttgcattattgatagtgcaaagatacaaaaatatttccatgtatgcaaatatgtatactattatttgcactttttctattgaagcgtaaatgattaaatgtgagtattattgtattccctctattttccgtcttacctcgattactcggtaatatgagaaatataacagataaggtgagcagtaaaaaactcccaatggcagggttgaatgtgccattgagagttatggattacaaccaatcagttggaatttgagcgtagtctgtcagcttattagaatcatagaaacaatcctgaaaacctgttggtgccgtgaactgctccggatagtttttgcgttcatagagatgcaccttttggccatctatcatcgtataaggactctcaccggtgagagccttgcaacttgcgaaggtgtaggcgaagtcagtgacttttcggttgttgtcaaagagagcggtcggaatggaagtcaatgacgtgcaaccaacgaaggtgaaattgaaggcagtggctttcggattattcgcaaacaggttctcgggaatggcaatcagtgccttgcaaccatagaaggtttcggagaaggtagtgactgccgaattatttgcgaataagttctccgggatagtagtcaatgccgagcaaccatggaaggtgagggagaatttggttacctctgggttgttggcaaacagcttctcgggaatggccgtcaaagccgaacaaccctcgaaggtctgttcaaagtcagtgacttttggattatgaacaaacaatcctttggggacggcgattagtgccttgcatttcgagaaggttccaccgaagttggtgactgccgggcaattcgcaaacaagttctccgggatggaagtcaatgctgtgaagcgaaaggtactttcaaagtcagtaactttcggattgttggcaaacagtttttccggaattgactctaatgtcgagcaaataacaaaggttgcattgaaactgatcacttccgggttgtttgcaaacagtttctccggaatggaagttaaagttctgcaactactgaaggtgtcatcaaagtcggtgacttctgggcaattcgcgaatagcttctccggaatggaagtcaaagcctcgcaaccatggaaggtggtggaaaatgttgtaacttccgagcatttggcaaataagttctccggaatggcagccaatgacgtgcaaccaaagaaggtactgaagaagtcagtgacctttcggttgttggcaaagagaccggcaggtatggatttcaatgacgtacaacaaaagaaggctcctgaaaaactagtggcattgggatggtttgcaaagagattggcaggaacactcgttaacttggtacagccaaagaatacatccgagaaattcgtaataccttctttgaaggtgatgtagacctttggatctttgagttccggcacaattagttcacctgattcgtttccggttacgatgagttccttgccatcggcaatgatggatttgcagtactcggccttgttaatcagtttgacatatgttccggtttgataaacaatcggttcttgcgtcatgttttgtttcatgatttttctaaaaaacatatttagagaggtttaggttgattactaaagaattgtttcttcctcttttgtactacaaaaatacaaattaaatccaatcttacatatttacaaacaagcattattatcatatttaatgattattgaaaatataccaaatagtaattatttagtatatttgctgaaaatttctatttatggcaaaagttgtacatgttcacttatttcatagcatagacaattcaaaacgtaaagattggtattttagcagcatatcagcagtctatacgactcttaaagctgaacaagtcggagctaccaaaaattatctccttcatgcaggtctttctgggaatggaactatttttaccaagaaagctattattaaacaatctaagctcatatcatgtacaaaaagcaagaaacaagtccctatcctcaatgaggaataaggaattgtcattaaacacacatttgtaaaaagggagtaattaccatctcccaaagtcaaacaaagtcttacaaagaaaaaaggttcagacttcgattagaaatctgaacccacatggaaactttacaaactattaaatttagaaaaatccattagattatgtgttgtacccttagttatgaatttcataaaaatcaagaaatgctgaaagttgctaccggtatatgctgaacagattcaacacccatgaaaacaattccatattcgcctttttcaacacaggaagaaggaattgtcaacaaataagactgcttgccatatttctctgcatgaaacggtatataacctttgttctttgcatcttcgtcaattacaccagaatctatctgaagccactgaatacgtctttctttcttagtggttgaaaatttaaccagacgataaaggctatgtggatcatattcgttattttcagccttaatcaaaatacgaatatcttgaccattctttttataattgaaagacgaggccttacccgagaatataatatccatacctactgctcctgtcaaagcactggctgcatcagccacatcgctgacgctcatagccgtcatggaagcctttactccagacaagacagtttttgagctatttgcgcttagtcctactgcagaaccaagtccaccaatggcactggctgcatcagcaatcttaccgattttaccgagcaaacttgtagttttattcttgtgaggtccgacaatacctgtttctttaggtagcactgtataagtagaatcgcttgtcaatatacaataactattaacaaattcaggttcatccagggttaaagaatcagcctctaaagactggtttgaaatctgattttgctgtacattcgaagtgactgattcattgttttctactattgcttttactgagtcagcataagctgagattgaagttactgataaaaacagtgctaataaaagtgttatttttttcatttgtatgatgtattgatttttgatgctgcaaagatacaaaattcctataaaatagaaccaaattatatttacattaattgttgtattctatatatttaatactatcagcacaaaaaagcgatatatatttacagaacaaattacaacttaacatctatagacatctatcgaagtaaaagtttaggggggcaatgtgaatccatataaaaacaagcccatcctttttttcggggaaagggcttgtcaatcaacctgtatataatgatcaaccatccgtggattaacgattatcaaaaaaggagcgacattgcagaaaacaaatatcgactccttctcaaaaatcaatagtgagttaccgcaaagaagtaatggaatacaaaatgcggtttaggagttactcacacctcctatgagcttctaagactgtcgttcccttttttttctgccacggctttttaggacacgaggtcagctttcctgcgtgcggtttcaagccaaaatccttgatgttgcaagcattagcaactggtacacacttggctctcgtgcgtaaacaattctatagacacacaatattgaatccaaaaaaactatttattttcaaattactcataaaatttactaccatcatcgcactgtctttcataaaaggatttttctctaaaaaagaacatattcaaaaacgatccccttttcttgcgctttttcttttttaattctttcttaggtttctctgaccgcgcaatggcaatcacgatgatcataatgatgattaattccataatcaagattttaaattgttcaacaattcatctgcgacaaagttgagcagcacaacagggttaaagaatttacctttttcgttcccccatctacaagttatatgtaaatgcggtccggtagtcctttttccagagtttccgcttatcgcaaccatttgtcctgcctgaactctttgaccacgccttacaagaatcttagataggtgcaaatacgagcatacacatattccatgatttactgttacgtaatatcctccattcttagaaaaggacacagctgttatcacaccaggcatcatggcatataccggctcatatttagctctcaaatccagtccattgtgcattctccgtcttttcctattcatcggatccttccgtatcccaaatggagaggtaatccaaatatccttcaatgggaatgacacattggatatacggctctttattacatttgttggtatagaatccaagctctgctcttttgtcgcttccacatcttcatcaccgtcagttgatatagaatcttctggcaatacatacaccttcggattgttggctacatatccgaccgtattaaatgtaccattaacgcgattttgggcaacacatacatcaaaaacgctaacgaatatcatagaaacgaatatcgagcttttacccaacacaaagttacaaatattttctgatacagccaaatttctttccctcattttagctacttgcagatgattttgtttgaaatagatgtccgttttcttcatacagccacttagcagttttggctattttgggaatatatttagggtcttccgcataccgtatctgcttcaagaatcgaaggtagtttcctcccttgtatctgcgctgaatcattttttgatagccgacaacagagtcctcccatttttcaaatcgaaaatagtctttgtgccgactatcatataatccaaagaggttgttgtattcacgacaaacccggcttttaaaatttcctgtttccaatacagcttgggccattacaaatagtttgttagacaatccgacttccgtcatgacttgtaataggttttgtatgtttaggtggtgatttttcccttcatagagtttgtggatttgtttagggagagttttcttatgcttgttttgtttttccaaggcaacctctaattcctttataaaaaatcgtagttcttctatacttaaatgagcatatttctctgtaagagaatcgacctttaatgaatctgatttttcaggttcattttttaaggaatcaatagctctcgcatcaattgttttgccatctttttcaattcctaagaccttcactttatagttatttgttccttgcttgattgtattgaattgcgcaaaagaagtctctggaaaaaagagaaagaaaaggggtaaaaatattttcatgccgtgaaattacacaattcagttcaactgggaacaaatagattcttgtaaaattcataaatcattgtattttagatattttggttctaccaagcattgtgtttagaaccaaaaattatattttatatctaaatatataggttttactccttcatgtttttcacgtccaaatttaaaagtacctttgctacaaagaatattaaaaaaaacgattatgtcagatattttatttcatcgtgaggactatccgtttgccatcttggaagaatttggtttaacggctcaaatgattttggatttaccggaatcagttcacctaagactgcaaagaggtgatttttctcctctgcttcccattaagattgagcaaccaaatggatatacaagatgctatgcaaaattctgtctgattgaaacagatgaaggagtgaatttgttgttctctcccaagttagagcaattagatttgaatcaattttcggaggaagaaaaacaattgcttctttcaggtaaagccattgttgcggatattatggagagtaatgaaaatgatactgcatcttctcaacgtatcaaagttttcgtccaaatagaccctgatacgaataatgtagtatataccccttcccaaatcataggccgtaatctcagttctattggtcaggaatttaatctttctgaagaagttctggaatcattttggaaaggaaaaacagccactatagaaagtgacattttcgatgaagaccaacctgttgaattgactattggcattgatttgttttcaaaaaccggtgtgatggttgtttatggcaatgctgaagattgggacagagccgttcggcttcagatacccgattactcttttggcaatgacggctgttgggtaaaaaagaacggtctgttgtcttatgttgaagagagcgactttactgaagaaatagaagaagctctggagcgtatgtcacaggaaaatcaagaaggaaacttcttggaacaatccgaacaaattgaaaaatcaatggactttctatcatctacaagacaacaaactcgataattcacaaataaaataagaagtatgaaaaattatcccgattacgaaacactatgtgaggaatatcaagctggcaatatttcagccgttgattttgtgactcagcagtcagacgaaatgagtgaagaatattacgatttttgcaagaatgaatctctcgaccctcattctgaaactgctgccaatgcctttatggattaccgtgaggctttatttgaagaaagtataggaaactaaagaagtgaaatatgagcattcgttcagaagcgatggccaccagatacagaggcgagttatcgtatcagttgcaagatatattgcacaggaatggtatgcgtgcccaagttgctttggttgaagataagtatgttcttatcgttcaaggacatgactccccagttttggaatatccgattactgaaagacaatttcaggcactgtctgatggtggctcaaattattcaaataagaaagcctataatacgttcaacagcattgtaggtaaagatttcgatgtaccaagtagctttgtagctgcacgcaatgtaaatggccttgttgcaatgggtttacatggctatcgcgaaacctatccgggtaacagcaccttatccccccctcgtgccatacctcccggatatttaggaatgcgtccttccatgcaacccggatttcacctgcgacgtgtaggcggtaccgtgatggtgcctgaacatttcgatgggcgtattcgccccggtgagcttaaaagcggtgcttacggttactattacaaaggatctcaaaaaccttcagtacaacgtgatcctctggaagatctgcaagaaatctttccggaagttaaagccactccaaggccaaccgaaccggcaaagccctataaagagtttattacttctcctgtctatttttccaatgagaaatggcaagaaattttgtcttcgcacggcatcatcatagatgaatcaaagaagagcatgacggttttgtcaaaagggactacacaggatttcgaatacaacttatctgaagaagatttcaagaagttgaccgacaattctttgaagtcaacacccataaacgagcgtttagatattatcaatagctatatcggtaatgacttcaatgaaaaagtaacaatggatatgcttaacagcaaggaaagcatttccattacagttaaaccaattccctcctctattgaaacccaacaggctgaaagtctatacaccaataacgatgcaactttaaaggaagaagtagtagcagaagctcgtatggctccaacgacaaatcctgaagagggctatgttaacggacagaatttacaagctttaaatgagagtaaaggttggtatcgtgaaggtaagcatggccgtgaagttgaagttggagatatttgggtcgaaaaaataaagcctttgaccaatgaacagaccgctttaacatccaaggcaagttctgatgagcaaaaaggtaagcagaaggaaaaagattccgaagttacctataagatgagtgccgtaatcaatggaactgtagtcagtcacgaaatttcgaaaagacaatacgacaaattcatggccgtggatgactatcagcgtcaacgcatgatgtcgaaagtatttagcgaagttgatatgaagacacgtccggaaatgcgcgagaaattcaatttgggagctttcttggctgccggtcttaccgcattaagcgaagcaacctatttaggtgcagatatagcccataacatatcccatatcaagaatccacatccacgccctgaaatatatcatgaaacccataaaagcgactttgtgtatttcaagccgggacttgaaagaccggaagatttggcaaaaagagcttacgatgcaggagttaatgcaacattgaataatttggatatgaatcggggaaggtagataataaccacaaaaagaatccgcaatggaactgacatttgatgattttataaaaagaattgatattcaggacttactcatggatgctggctatgtgtttaatcgcaaagacggcatccgctatccggcttatgttcgaccggacagcaatggtcatcatgtgaaaggagacaaatttattgtgtacccttcacgtcaaacctgtttccagcctcctgaaataaaagtgtacaacgtaatctcattcattactgagcacccccatctttttaaagattatcaagaaggtatggatccttatcgtttggttaatcttgtctgtaacagattgttgaataaccctattgaccgaacggttcatcctattattaaatcatccccacaagtaaaggatttcaatataagggattatgaattattacattttcagaaatacaactttgacaatatcaaacagttttatccgtatttcgtaaatcgtggcattaacaccaatacacagaaagcgttcggacagcattttttattagcaaccctgcgaaaagaaaatggaacttacttcaagaatctttctttcccactccgaataccgggaaaaactgatgctaaatcaactgatttgaaagacatcgtgggttttgaagaacgaggacgcgcacgtctggatggcagtagtggttataaaggtaaagcaagaggaagcaattcaagtgaaggtttatggattgccagccctaacaataccgaacttaaatcagcagaaaaagtgctatggtttgaaagtgcctacgatgctatggcatactatcagctcaatgcacaacatgacagtagtctgaataaggctgtatttgtttccaccggtggaaatccgactgttatgcaattcaggggtgtaataaatgaagcttcgaaagctacacaccatctttgttttgacaatgatttggcaggaaatcagtttgttgagaatttcaaaaatgaattgttctatgtcaaatctaaaagtacagaatcaggtcctcaactttttgactacatcaaatcgctatcaaaacctgacaataatttgtccggagatacagatttgttgccagaaaatttgcgaagagcatacggatcatacgaagctgcagaagaagaatggcattctatgaagcaatgcggttctatacatcctgatgatttaaagtatcaggcagataaggcgttggcatactatgatgaatataagaataaattaaatacagctatttcgacatttacggaaaaagtttcgtttgttcgggaaattccggaaggaggttctaaggattggaatgacctgctcttgaaagaaagcaacaaagcagacaatacccaggaagagagcaagtctgaatattcgggaattgacatagacaatgatgggaatctatctgctgatgaatgtgatgaacggaaaaaaattacaaatttcaaaaggtaatgaacaagaaagtacaacctatccgattacatcctcattggaaacaatttatcgccactgaaggattgataattccgattccaattgctttaatatttattgccggttatgatgaatttcccattccacaattcattccttttatattggtattgagttgcattttcattatcggcatgatatataaatatttctatatcatcaaaatggtatatgtcatcactgaagaacagatacaatcagaacatggactgttttctgtacaaaggaattatgttgaattataccgagttattgattatcgcgaagatcagtcgttcatacagatggtttttggcataaagaccataaccatttacagtggagaccgttcaaatccccaactaaaactgattggaataaagaatgatatggatttaatcagtattatccgtcaacgagtcgaatacaataaaaaacggcgtaatatatatgagttcacgaataaccaataaaaataagggtatggaggattatccttcatccctttttcaggataaacagaataagcgtcaatggctgattgtttcactgctggcacttattctcttgttcgtcatgactaccagagcaaatgctcaatctttttatgggttctatggagtagtttctaatgtaggtgaacaaacccttttagctaaaggtaatcaacagattaacgatacagtcagaagcgaaattaagcatcaaaccaagacaggtgtcatacagaatgcaatggctgcggaattttcgaaaatgagaaagtgggaacaacaatacaataaatatttaaaaaccgctacgaatttcgcctcttccctcaaagctgccactcacatctatgacagtggaatgagaatactactgacattaagcaaactgcgtaaagcagcatctaacaatccacaagggattgttgctacgctaagcatgaataacctttacatggaaaccctattggaatttgtcagtgtaggtaatttgctgaaaaacgcaattgctaaaggtggtaagacaaatatgctaacaggtgccgaacgttcaaaatctctatgggaactggaagaccgtttgtcatcactatctgcacgtctttaccaattgtacctaagcattcgtcattatacgatggctgatgtctggtatagagtcacagcaggaatggtagacaggagaaaaggagaattagctgaacaaagtctttcacattggaaaagatgcgctaaagaagttgccatatatgccaaataagatgaaacgatacttttatatattattactgatgctatccttttgtcttgtcagtcaaaaatcatacgctcagatagacccggttttaaccggaatgatcattcgttttaccaatacatcaacaaagcagtattccaaacagatggcagcaatgtcagctcaaaccgagggacatgtatggctacaaagcgaagttgaatccgtaaataattgcttgaaagaatttgatgattatcttaatgactttagaaatatcatagcctacgcagcccaagcatacggcttttattatgagattcatacgctatgtgataacatgggagacttgacacgtcaaataggagatacaccggttaatgccattgcagtagctttacacaataaacgcaacgacatctatgttgatttgggtaacacctgtgttggtgttgtgaagattattaaagactgcattacacaaaaaatggatgaagaggacagacttaaactagttcttagcattcgtccgaaactaaagcaagtcaataacaaattgttcttacttatcaaacttgtcaaatacaccaatatggggcttgtttggaatgagatagttcaaggaacaaaaccgcataacagagacaaggcacaaatcgcaaaagattgtttaaagtcttggaatctcaatgcaaagagtgtgaaatcaaaaaaataacaaaaatatggcgtggttatcattattaactaaagttgttccccaattattaaaattaggagcaaaagctacatcccaaattacgagtgttgtagcagcaactacagcaaaggctattcaaggcggtaaagtgggtgctgaatttatcataaagaacccaaaaacctccgctgtggcagcagttgcgagctatgccgggtggaaaaatattggcactgatgattctataggaacaagtgttggcaagaccttccgggacgcaacggatggtgccggaggttttgcccatgatgtcgtgaatggctacactggtgaaaatacggtagaacaagttaaggaaactacgcaatccgtagtgaatggagttgcagattcagccaatgccaccaaagattttttaggtggaatcggtaatatgatgtctggtcttgtcaatatgataggaagtggagttggtgctatttcaaatatgttcaataatgttggccttggtaaaatatcaggtttaggcatttttggtttgattgcagccggttacatgatgtttggccgaagcggaatcctcggaaaaataggaggagcgttgatggctatgtttattctcaacagtacgtcagaagctaagcaaaaagaacaagcaacggctcaaaccatgcaacaaggaaatacccaagaaaatcaacaacaaacagctatgcgcagataaaattttaaagattatgaaaaaagtaattacccttttattagttctaagcccgactttggcttttgccgatggcattaccaatggactgggtatagcaggagattctatttataagtacacccctgctgttcaatcattaggatatgttatagcttgtattatcggcattgttggagcattctccatctattatgccatacaaaataacgaccctcataccaggaaaaagattcttacctatgccggttcctgttttactatggtagctatgtcaataagtcttcctcagtttttcgcgtacaaagaatcaggactgatagccggtaatcaggaaactggagggaatggaggaaccggcagccaagtcggtggagacaattatgatgatattattacagatattccaccgatgaatcatccaagttggaaaccaaatcctcaattcccaataaaacccggaggagatgttattattattgaacccggaggagatttgacaatagttaccaagcctggtgatcaacctatattaaaaccttcggaaagtaaaaaaatagacatttaatacataacgaaagaatttctgaatatggataatcaaaatatgaatctacaaagtccaagtggttacgcaatgccttttgaacttacagaatcagaaccccttgaaataatcaaggaatatggcggtagtgaaaatgacttcaatcatggtattgactttaaagtgcgtccaaacacatggcttaaagctctcgcaacaggtatagtttcgggtgtttccagtgatattcaaaaaggattcaacatcactattatataccgtaattatcagccacaaagtaaagctgcctatgaagttacctactaccatatcaaagaatcaatctgtaaatttggccaaaatgtgaaggccgaagacaatgttgctgtctgtgacgattatttacacatggaagttagattcaatggtaaggaaatcaatccccttgaatttttaactatggtacgcgataacctcgtcatggaaagccaaaaacagatgagcggaaataatccggagattgccactcttgattttgatgtgcatacgccttatgataatcatgaaaaagaattggaccagatgtataacagattctttgggtcctacatgaaggatatgctcttcaaccgctatcaggtacctaaagctacagaaaatacgctacgagatattatacaagaaggttcacgcttaggtgcttactacgaacatataccaagtatgctgaatccattaggcttaggagaacgcagctttggcctgataggaaggattcagacattgcttattcaagactttctcaattacctggctcttatgcaaggtgtattcctttcctccatgacagaagcagaaaaaaaaaagctactgacagggcagtagaaagtcaaggtgtaatagaccctcttgcggaatttgacatcgacattcaaagtttcgatatagaaagaaccgtaagtgtatatcctgacaaagatggtattgtgtggtggacgaaggcgtggtttaatggcaaagcaaaaggtgagagagcaatagaaatcaccagagaacttgccattaaattcattcaggacaatataaaaaaggacgaatggcttgaagaatattatccccagcaaatgcagattcttcacgcagcccttgctcaaacacgagaacaagttatccaacaattaaaacaaacctatacttaatcatgtcatcaaacaaagatatatttaacagtgctgtactacctgttatgaagaaagtacagcatgatctggaagaagccaagaggcaggaaatgatcaaacatcagtcttcttggcacgcaaatatgttgggaggtatcggacctgacggtggcatgacagcaatagccagtcataacaacttaatatataccatcggagaatggaacagcaaaacagctgacgattatttaaagaccgtaaataagatattattaagcaaggggataaaggtgacaccggagattgagcaacaaatgattgactatttggtcaagcaaaagatgcccaagtccacaacagattacatcattaagaaaattcaagaaggcaatgtattcagtgcaacgctttctgctacaagaacttcacttgaaggccatatcaagcaagaagccgaaaaagagtataatccctcatctttagaaaagttggccggtgaagtttctgcttttgtttccaatgcagttgtaaccatgggacaaggaacaatcgcctcttttatcggtcagacattattaagtacaacagcaaattctatggatcatagccaagcccaacaggaacaatatttagaagaaaaaaagaaacaggcaaaaaaagaaattgctgctgccaataaaaaagaagtttccattccctcatggatgatgaaacaaatgggtatcagcaatatttctgaagcttcaaacgaggaactaatgaaggctcatgaatgggcttatcagaatgctctaagctatagaaataaaattcatgcaactgtttcagaagggaagagagcagtaaaagcctctggtaaatccaattatatatctttgactgaagcaacccttcaagccaaacgatatgaatcatttcagagactattggaagatgaaataaccaatcgaatgaatcatcctcaatggatgatggaaaagatgggatttaaagatatatcccaagcaacagaaaagcaacttcacatggctacacaatgggccagtggtaatgccaagatgtatcgtgacaaaatccagaaagctgctctcaatggccagtctacggttaaggcatcaggcaaagattcacaaatgtcgattgatgaagcaactgcaagagctttgcaatatgaagcatttgccaaagcagctaaagctgaagccaataatagaaaagtcgtttcaccggtagcatatgaccatatagatgaagccgaaagcgatgaagcatataggacttcaaacagtacaaatgatgctaatactgcaaatagtacaaacaacgagaatcagcaaagtaatactccatccggtgattactcgggttggaacaacatgattagcgaagtaggtttgaaaggtagcgttgatacgatgaaaaacttaggtttgtcacttgcgaacctacctgacatgcttatacgtctttttaccggacagacaaagaatgaaggattaacatcaggaactatattaccctttgctttgataatgtgtggtatcttttccaaaaatccgatgttgaagataccattactgttgctcggagccaccaacttgctgaataagtcgaccgaacatgtattagaaaaaaatggtttacaaaaggaagaaaattcatcagttaactataagcagtacgcagatgaacctctcaatcaaaggttgaaaaatccgcaattagaggggaatgtattactggtagatattgacaatgttcccagaatagtgaccctcccccctaccgtagttgatgcttaccataaaggagccttgccattgaatactttggccaataggattttgaatagagcagaccaactcgctgtttctgaatcgcaatctctacaagcttcagaaaaatatgaaagcaatcaggttcgtgagcaaagcaaaggtctcaggtaataaaaataaaatataatggaaacagaatatataaaaagaaccgggcttgaaagacagaaagaagtcctcatagaagccttagaaagagctgcaaaagaaaatggtttgtttctcaacaccaattataagcagcaacctcacttctataacaaagagttgcaaattacgcctgtaaactctctcatgatggctatgcacagtgacaatggaaatttcaagtcaaacgcctatacgacctttcaaaatctccaagccaatgatgcagctattcgaagaggacaaaaaggagttcctttcatttggagcaatctcaatgaatatgttgaaattgtgaacccggaaaacaagatcaccaaggatagtttcaacaaattatctgaagaggataaaggacgatacagagtcaatcctaaagaaaatgtatttacacttttcaaccttgaccaaactacccttccctttgttcacaaggattcatataagacgcatatcaatgataccgggcagactgcaccgcatgatgagaaagagctacgcatagacatcaataaatacatacaaaaaatgagggaaaatctcctgcctatacgcagagatggtataggtgtagctcattatgatgcaaacagagacctgattcatattccggctcagaaagaatttgacacatacccggaatatgtacaggcagtaactcgtgaaattgttcgtgctactggtgtaccacagcgtttgaacagagaaggaacaatgtcttctgacaaagagaaacaggcgcgtgagagtttggtagaagatttagtttcagcacacaaacttcttgaatttggtttgccttctaaattgaagaaaacaacgattgagaatgtaccatctatcatcaaacatatcaaagaaacgcccaattatacggaaaaccttttccgcgacatcaatcgtgctgtcggcatgatgaaaaaagcagagaagggagaaaaaatcaaagtcaatgagcgagaaacagtggaattactcaatgtaaattctcaggaacaagctcagagaaatacgcaagaaaatcaggtttcaaaagctgtttcttttgagcagattaccattctcaaagatgataatgaaaaatggactttggttgcccgaccaaatgagcaaaagccttttgccattcatccttcaaagcaggatataagtatgtactttgattccttgaagaatccgaacaaggaagaaggagttagcattagaactgaacttgctcaaaaatattatggtctttcccttcaacatcccgaattgaaggtggacatatttaataccggagctacgcaggaaaacattgaaaaaattgacagggttaacgtctttagaaccaaagaccaaaaaaacatgatcatcgcgtatgttgacggaaaagcattgcagcccattgagctaaacaaatctctttatcaaagattttggttgacagataatcgctcagcttataaagtagcactggcagcgagcctttacgctgaaactctcaacaacattaaaaaagagggaacaaaacaagcccaagaagtagagcagactgcaacaaaagagcaaagtaaacagtcagaagtttctcatgatactgcagaaaagaacattcctcccattatggagcaatataaggctttgaagaagaattattctgacgcgcttctactgtttcgcaaagggaactattatatagcatattctgatgatgctgtcacactttcaaaaaaacttgatctggaaataaagacggagaagaatcattatgaaaacgagaaaactcctctcaggagtgccagttttcctgccagttccttagacggaaatttgccaaaactgataagaagtggttcaagagtagctatttgcacccccaacgaggaagaacaaaaaatacccaaaccatctcgtcaagatccacctaaagagcaggaacaaaaagagtctattgtatcacgtccatcaatgcacagataaatgggagtaaattcatcaagacaacaatatattgaacaatatgcaggatatgccatggagcaaatgcgcagatatggcattcctgcctctgtaacacttgcacagggaatcatagaatctgcatccggtaaaagtactctggcacaaaccgctaataatcatttcggagtaaaaggtacttataatggcaactatgtactggctaacgatgatcgacctaacgaaaaattcaagaaatatgataatgtcggtcaaagttatgaagaccattctaaggttctgactgctaatcgctatcaaaaatatacagcaagtctttctccggaagattataaaggatgggccaacgccatcaaaaaaggtggttatgctactgcttccaattatgtatcaaccattgtcagtgtcattgaaagcaacgatttgcacaaatatgaccaacaagtgatgcaagaaatgaaagcccaaggcaaaaagtttggtgttgaatcaaatcccttatcttccgataattcaaacgcgaaaaccaccaacacggccaacaccgtagctataaaaagtacaggtatgaaccttccacaaggtcaatacagtatgccggtagctcgcgaagcatctttgtttatcacttctccttatggcgaaagagttgaccctatcaataaatcacaaaagcagatccatcacggaatagatattaggacacgcaaagatgatttattggctactgaaaataatggtaaagtaatcggtgtagacaatagaactgataccggtggaggaaaaacggttactgtcgaatacgtccgtgatgacggtagtaagacccatgtgcaatatatgcacctatcccaaatcaacgtacaaaagggtgatacggtaaatgccggtcaaaaattgggtgtatcaggtgcaactggtacacgagttacaggtgaacacttacatttgggtgtaatcaatatatcggcagacaacaaaaagacttgggtcaaccctgcagcttatttggcagaaatcaatcaaaaaggcaacttgaacaaagaagccttgtataatggcaaaaatttactcggccaatatgcagccggtggccaagatccaaaatctgtccttcaaaaccagcaaggagaaacaaatcctgagagttggatgcaaaagctgctttcttctgaggatgcccaattagacaatgcccagagagaaggcttgttcggaggacttttccagtttttaatgatgctgcttatgttatccatgaaattggataaagacaaaagcaacgaggaaaaacttcaggcagtcagtgatgcggtattcaacaagaaagttgacatcagtagcttcactcccaactttaaaagtgcctcaatcagtatcaatgccaatgggaaacctatactcaccgtcaatgacggaaaacaggaaatatcccacgagctaaccaagaacgaacaaaataaaattgccggtattctcaacagtgacagcgatgatactatgaagaagcagaagattacaaatatagtgtattccatcaccttctccaaacaagcgtccaacacatacgaacagatagaatctcagcaacaaacgcaagaacaaacacttcaacgcaaataataaccctttaaactacaagatatgatacgcgcaaaagtaaacatcactggtacaattaccaaagaagccgtggtaagaactgacaaaaatcacaagtcttacctttcattcatcctcacggtgcggttgtcagatcccaaaatcagccaaaaggaagtgaatatatttgttgccatgtacaatggcaaacaagaagatctttcgattctcactattggcaaacaagtggttgtttcgggagaaatggatattcacaagaaagaagacttttctttctatctgaacgcagaaaaatatgaagttcaacaacttcaaagcgtagatgctatttccggttccctcattttcagaggtcgtttgaaaaacgataatatctatgaagagaaaaatgataagaacggcaatccctatctcatcttctcagcttattcctcagaaaagcatggagaggagttcttcagtacatgggtaaactttatgcgtttcccggaaaaaggtgcttccatcgacaccattaagccggacttcatgaaacccaaagccacattaagtattattggagacttgactatttcctcttatgatggcaatatccgcatatcctctatcgtcaaggaaatctcagaatatcaaaaaaccgaacaacaaaaataaaacaaagaaatggctaagtatcagtataaaaacaacggcccatctgctgaagatagagcattggatgtatttgccgatttgatgattaaaaagattgaaagtgtgtcatctaactggcaaaagccttggtttacgaaaaacgcacttcaatggcccaaaaatctatcaggccgggaatataacggtatgaatgcgctgattctcatgtttcaacaggaaaacaaaggttggaactccaaccgttttgccacgtttgagagaatttccagtcttaactttgatgataatagaaagccacttgttgacaaggaaggcaacaaactccctttcgttacagttaccaaaggagaaaaaagcacaccggtcatgtttacttcctttacggtagtccataaagagacccatgataagattaagtatgatgactacaaaaatctcccggatgacgaaaaattgaattatagtgtatatccaaagcttcaagtctacaatgttttcaacatagaccagacgaatatcaaagaagcacgacccgagttatatgccaagttcaaccaagaatacgaagaggtccaacacaacaacgaaaaggaaactatggaaattcctgccgttgatacaatgattaagaacgatctatatgtttgtcccattaagcctacccaacaggatagagcttactacgactctaacaaagatacgattgtagttccgttgaaagaacaattcaaaaatggtgaagctttttacggaacactgttccatgaaatgagccatgcttccggagcgcaaaacagattaaaccgttttgcctctggagatcatttcggttctccctcctatgctcgtgaagaattggtagcagaattgacagctgccctactctctacgagatacggcatggaaaagaatttgaaagatgatagcgcaaggtatctgaaatcatggctctccaatctcaaacaagatccttcatacatcaaaacaacactgtttgatgtaaagcgttctgccaactatatttcaacacgtgtggaatctatcgacaaccgattgaaacgagatggcgtaaatgctgatttttcagatataagggaacaaaataagaaggattctgcattgtttatcgctaacgaaaataaaattatagacaaaccaaagcaggaagaaaaagaggaagaaaatatcaacacaagcgaaaaaatagaggaaaatgctcaggaaactgagcatcagcgatttcgaagatagtaaatttggttctaattcagaagttttatttacttttgctgaagataatattgcttatatgtactttggcaatacccctgtacaagtagactacaatacagctctctatattttacatcaaaaagactctatgccacaagggaattcctggccagaggattttcctgccatcataaatcataccagtactactgctgcaagaaagcaccctgcttttgaagctgcaaaaaaaggagattttgaagcagcacttagtcttgtgaatgacatggttaaggatgaaaaggtttatcatattgtgcaaacataccccaatgctcacattatatacaatcatcgcatgaaaggtgatggtatcaatatgatccctgcagcatacgcagctatgtttgaagcagcaggaatgcaagtcgaacataatgtagtcggaataaccaatgtttctcatacaggagcatcagatatatctcggatttgtaaaaggatgcgttacgaaggtaatatcaaccaaggtactgattatatacttttggatgatttcattacttcgggtgctgaacttagagacctgagagattatgtagaaagtaagggtggtcatgttgtcttgatcagcacgttaggacatggaagttatagtaagttgtctgacataaggattgatattaaatataaggagaaactactgaatttaggtataaccgataaagaacttcagaaatatggaatcgcttcaaaagttgattgcctcacgctcggagaagctgcaaaactctcacgagtggttgagtgtcaaacaaaaaaacaatttacgtcaaaccgcagcggagttcaacatcttgaccagagaaaacgagattcgcaaacgatgggcagagaaattccggaatccggaacagtatgcaaatcagaatcttcatcaaaggttcacgaagaacaaagcgtaacagttatgtcaagacaaacaaatcatcacaaaataagaagataataatgaaaagaaattttttattagcatccttgctgttatgctcaatgacagcaatgagagctgaagcctgttacaaagaatgtcatattgatgatgacaaagaaatgaaacgcctgacagccccattgaaaccgacctatctgaatgatgtagtttcaacaggaggttgggcaagtaattggtttcttgaagtaaaaggtggagcttctgcctttgtcggtaaaccggttggctgtggagatctgttcgacagaattatgcccactttaaatattggcttcggcaaatggtttactccggcagtcggcacgagattaggttatcaaggtctcaaattcaaaaatgccaacttggataagatgaaatattatcatatccatgcagatttgatgattaaccttacctcaaacctccaacctaatgagtatggtatctccaaattcgatgtaattccctttattggttttggctttatcaataacagttctgctactcccggttatttacaagcagacggaacatcaacagataataagccctttgcgctgaattacggcgttgaattacgatataggctttttgacagactgcaccttatcggtgaagttagcggtatttcaaccatgcgtcactttgactgtgtaggaacatctggaaagattggtgataatatgttgaatgtatcagttggcatttcctacacacttggtaaacgcggttggaaaagaatcattgatgcagaaccatatatcaaccaaaataattacttgttggatcactatgcttatcaagaccaagccaacaatggtaatgggttgaacacaaccattgtttctgatggaagtaataactatagcggtctgaatgcgcttcgtgaaagacttagcaatgaatccatgcaagattcaatagccgataataatcagaccatcattgctgtaggagtacccatccacttctatttcaaaatcaacactgcaaacctggttgataagacccaactttctaacttgaaagaaattgcaaatatcgccaaagaacagaatttgattgtacatatttctgctgcagcagacagttataccggtaaggctgcttacaataaaaagcttgcagccaaacgtggaaactacatagccaagaaattgaaagaatatggggtttctatggataacatgagaggtgcgaatttgggtggtatcagcacatacgctcctgctgaagccaatagaactactattattctactcacaactcactaatgattaagttcggaatgaaatacatggtaatttctcttgtttcggtcttttgctgcagtctgattctttttttcagctgcagtgaaagtccggacaaacgcgctacaaaagttgcagaaaaagctttatacagccttacttctgattctatcaagatcacgaaaatcagtaagcctgagatgttttatggattgaatttcatcacaccaaaggaaaaagacgaactttccaagcgtttgttgaaatacaccaatcaatttttcgaagaaactgactatttccaagatgtggatgaatttgatgctgagatgagtgaaaaggtaaatcgtcaggtggatgcaatgaatacgcttcgacttctctgtgcatacggagaaattgatgacctcaataaaaaacatgagaatgtacaaaaaccattcaatggatggaaagtaaaaatcacctttgaaacaaaatcacccaaaggttccccctaccgttcggaatactggttcattctcgacaaaaaggctgaaattgttgtaaaatcatttgaaattcctctgttatattaaagaaaatagaacgacactcacttcattttacggcacctttaataattgtagggcattgaccggagaaagtctctatacgatgatggatggccaaaaggtgcatctgtatgaacgagcgaattatcccgagcagttcagggcaccgaaatatttgaaaaaagccttctatttctgcagcggtctaacagattatgctcaaatgcccatatcttggaaacaattattttctcccaatggtaatttctctaccattgggagttttactttaaaacctaaatcatagtcaaaaaaaatcttctctatattgttctattccctttattatatacctttacaccccaataaataaagaacgaaatgagcaagttaacaagagaagaagctttgcaaattgcagcaatgtacggtttaacaaccgaaatcaaatatgcaattggctgcggtcaatcacccgaacaggcgttaagagactgggatataataaaagaagatgaaatcgagattatctccggaagtgaagatgaaatacctccagtagcaacaaacccagatgtaaaagacggagatgatgttgaaataatatacagagaagatatatattgataacattttatatttgcatcaaaaacaaaaatcatggaagtagcaatcaaaaaacaaactacattcagattggatagtgacctgctggatgccttgaagagtgccgccaagcgtgagcatagaagcctgaataattttgtggagtgtattcttcgggaagtgatatacacagaaccgaacgaggaaacaaagaaggccattgtagaagctcgtgcagacaagaacttgaagaaagttgatatgagcagctttgaaaatttcattaaatcttgtagtgaatgagagaagttaagagtggaagccaattccgaaaagacttgaagcaatacaaaacagacaatgccatatccgaagaggacagtttgaccacacgtatttgcaagggattgcagcaggtgaagttgattgaagaagggaaacttccaagtagaaccatagaagaccttctcgatgagctttgaaatcattccgacacctgactttgcccgttcagcgcaaccaccaccttgcacaatccgtaggggacgcagcctttgggatgttgctgacgctgctgaagtacaagtaccgttggtatggtgtaaacctcataaagatggaccgctttgcccatgcggtggcggacaagacaacaccccctcggagggggagggggtgtgcggtttttgaagagcttttctgcgcgtgtacacaaataagtacacaaatattttggaagctgatttcgaaatgctatatttgcgctgtaaaccaaatatatagattgttatgcagatagttacaacacgtgaatttcgtgccaatcagaagaaatacttcgaaatggcggaaaaggaaactatttttgtttctcgccggaatgctgctcctatcgttgtgtatgcggctacggaagaggactttccttcccgagaggagttaatggcaatccagagaggaattgaggatatcaaggccggacggactttcaaaatgggaaatggtgaatcattggatgacttcttgaatcgtatagaatcggaatgcaatgtatgagatagagttttcaaaagaagctgtaaagcatgtgctggtgatgagaaagtcttctccacatcttttcaagaagttggaaaaactactggacgaattgagggaacatccatacaccggaactgggcatcccgaacagttgaagtttttgcagggggtatggtccaggcagcttgacaagaagaaccgaatccggtacatcgtgaatgaaacgcccattgttgtgttcatagtttccgctttggggcattacaacgacaataaaattcaagtgacaatattccaaaatagaatattccgtaaaaataagtcgaataacaaagcttacaacctattttgaacaaaaaaagacgcaaaggagttagtcgtcctttacgtccagaacttcgaaaataacgattaaaacatttctacttgaccaggaagaaaatactcataaaccttttttgaaagagttgttgggtgcatcacataacctttctctcctattcttactttatatcctgcagactcccattggcttgatgttgcaaaacaagccccagtctgacttcttattggaatattatcatattcacttttaggtacatcttctaatctcttatgtacaaaaagtcgagccttaaaatatttgcaataaatagccttatccgattttactgaacgtttccgtattatacaataatatttctttaatcccaaacttaacagtttatgattcacacattgaccgcaagagaatccttttacatcattttccatacatcgttttgtaaaatgtcatttttagtgagcgaaataagcctacaggcatgaatattttgttaaaagaatcttctctttcccaatttctcctgcacaagctttttaaaacacgactattattcacaagaataaaaccatactgtgtttgtggtaaggtttgcattggctgttcctgttctgttgcagactctgcttctacaacgtttttctttgtcttgctgttgctaacaatggtcatcagttcatagggacaattcaccatggaaatgaatatcgcccaaagcaggatgttgcttccaacaaaaatgattgactcgacaaacagactttggtgaaagtcattgcctacatacatcgccacgacaagagagatggcgagaattgctgtactaacaaaagcgtagatggtacaatctgatgttgtcttgttttctatcattatcgtattcgttttattgttattcgttcaaaaacttccacaaagttagatactgaataaagtaaaatcagaatcctttaaaaaggacaatcatcaacttcttccacttttgaattatgtttttgtgtatcaacagattccaatgcttcatgactatcacttttttcgcttgacatttcccatgcttcacctcgatagtgtttcatggcttcttcatcaagcatgaaattatccaaattaaccaaagcccatgtaatataatctctatcagcatctattacttcatgtatattatatcctttatattttccgaaattaaatacctttgttgggaaaagctgtttccgtgaaaattttaatatataggcactttctatagcaacgtaatctaacaggctttttagttctacatcattgataatgccatcaaggagttttttagccaattcaagtgttctactaaaaccttgtgttcttttcttctcaaaagatttgttctcaatgatttgttgtataatctcctgggcagttgaatcctttttatgaataatggttctatcttggacgtttttccaattttgataatttgattcatacatagtagccatcttgaaattactatacctttctttatatttcacaccacaatatttccatccttcaggcctattgctgaagtcttccggatatgcgtacaggttgacaattttatcccactgccagctacactgttcgggagaatgcgtatttacccaaaagagaggatcattataaaactcttcaaacacctgttcttcctcatcttgtagagagtcgcaacactcctgacacatatagaacttagaaaatgatattcctttgggcttgtacattttaatatagttctcaaactctgcacatccggcggtatgttgtggatattttgtttcgcacaaatcttgataattgaaatcagttcgaataaaagaaatacctgaattcaaacagacaatgcaacagtgtcgaattcattgttagttaataatttatatttttcctttggggtcatgtaacccaatctttttctcggtcttgagtttaagatgttttgaacgcgcattacctgttcattggttatgtccctaaagtccgtacccttcgggaagtattgcctaatcaaaccattgctgttttcattggctcctctttcccacgagtggtatggttttgcaaagtaaacaaaaatatttagtttacgtgcaatttcttcgtgaaaactaaattcttttccattatctgccgttattgtatgtatttggtctctaaaaggttccaaggcatcgatggcagctttagttagcgggctggcatctttcccgctaagtagtcttatccatactagtccagttaccctgtcgtttatagttaatagtgctcctttgtgattcattccaatgactgtgtcaatttccaaatcaccaaaacgtactttcttgtctactatcgtaggacgcttgtctatgtccacgcggtttttgataaaaccacgtccattagtcaatgcacctctcttcttatgacttcttccccgtcttcttaaatgcttgtataacaacttatctccatgctttttatcttcccaaatatactggtagattgtctcatgagaaactgtttccaagccctttgttcgcataaacccagtcacttgttctggactgaaatctttctttatgagtatatctacttgaattttcaagtcgtccgtaaacttcacgaagtgctttcgtgaacgcattctggacatatacttagcctgagcgagatccggtttgtaaatgccattacgtttatcactattacgacgtaattcacgacttatagtgctacgatgaactcctacaagattggcaatctcggttcttgactttccgctttgcagataagcggaaatgttatacctttgttcttcggttagctgtttcatattgcaactgaatgttggggaactggaagatgcaaagaaacaacttttccacaggggaacaaaagggaaagaaatcttctttctctgttcctctgaaaaattattcttttcgtatcttctcattgtcatcattctcactcctgttgcattatccgcttgaacttaggataaacttcgctttagaaaaactaatttcaaactcttttccgcacaaagggcaagtaaaaacgatgaatagcgaatgcctctttggggggtcgaaaggtggaaattccgacaacaatatatccctgtcagcttttgttactttgcgaagaaatttgtacgcatcgtaggaaatcctgttattgggataaaatatgggtttgcggttcttcattgcttcctgaatttcttctactgttaccatgattttatgtttgaatttcttctacttctcaatgtcaagcaagttctcaaatctgctttcaagctcatttatccttgcttccatttcatgaatttctctatccaatttatccttcttcagcagaaaatgggttacttctctgactaaatcaagtttgtattcatacaatgaccgatacctggcttttgtctcgatcgtgttatttccacgttgcaatccccactttctgttgacctccctttccagttcagaatgaagtttagtcatgttgaaagattcctctttcatattctgtccgaaaactgaagtccatgaaattcgattcttttctgcatccaccggaaccaaggtacaatggatatgtgggctcatctgatccaagtgaacatagaagctcatgatgttttcttcaccatattttttagccatgaaactatatatatatctttagcccattcttcgatgtctttacagcgtgttatcccggaattatctgcgcctttgatcaaatccaccctttggcttccaaaggccaattcgtgcattcgttcgcggtttccaccaaaaataaattgtgccaaagtacgtcttttcatgacggcttttgggtttgcattcgggtccttgatacctcgtgctgccaaattttctgccatcttttgagcaatacttttggacttatcaataggctgcaccaccccacctttggttacttcaaagttgagtgaagcccgggttggatcatagtttgcaaagctgtctttggccttgttcttccattgttcgtccgaccaatttctctgctggtcattgctttccatttggctgatgccggaggttgtggatctcatatccattacttgttttcttcctgtcatattataattataattttttgttccatacagataagtaaaacttatatacaaatttaataagaaataatagaatagaaagctaacacaaaggataaaaatttctgtctatatttttaaggatgatgctattctgaataagttatagaaataaataatggattcttatatgtaaaaatatataaatcattattcctaataccatcatctattatagtcttcaatatgaattaaatgccagtaagcagaccgtgtaattatacctcctgccaaagactatgaaaatgtaacacaatcatgtttgcaatataaaattcctctctctacttaattcttacggttctaaattctttctattccatatcttaaatacacttatgccctatgtttaattacgcataatttaccccctgaaaaatcaattatcccaaactcgatttatatcaaattactgccaatatataagtaatatcagcaataccatatatattgtaaataaggtattactgatattacatttcttgattcaatacaataaaaacaagggaatgaaataataagtattactgagtaatatcatattatctaccacgactgcgcttcctttttgcagggcgtaccattgcagtagcgtgagccaaacacttcctccaccatctatcatcatcatcatctttatcacgtccccatccagaagttggacctccccctccaccaccgcaagacactgcataatcagtagctaattgtatatatcctcttgccaacattacagcacaatttaaaatctccgcacttttttcaaaaagcaaggcaaaatcactatcctccaatatttcacgttgttcaggtgttaaagttggcaatatagggcgcattgcagaaagcatcataccgttaaactgacccaccatatttctctgaatatcagctattttactctcttcggattttaccatatctttttcaagattcgtgtgttccctcttcatctcctccaatttttcattggcttcaagcaggactttcttagtattctccaacatttgatgcctttcggccaatttttcatcaaccctcttcatttcctctcttaaagctgccattttattacccaattcctcattgttaacaccttcttgaccgaactgtttggcaatcaaatcaatctgcttttggatgtcttctttcctattctgaaggttttcaatcatggttgaaagtcctttcaacttgatttcgttacggtgaatttgctttatcaattcctgtcttgtctgttgaaggttggtgacctctcttaccaagtcacgcttgtattcttcagtcgatctgtgtcgagctttagtctcggccatgttgctaccacgttccagtccccactttctgttaacttgtctttccagttcagaatgaagtttggtcatgttgaaagattcctctttcatattctgtccgaaaactgaagtccatgaaattcgattcttttctgcatccaccggaaccaaggtacaatggatatgtggattcatttcatccaagtgtacatagaagccaatgatgttatcctcaccatacttttttgacataaattcataaacatcctttgcccattcttcaatatccttatgccgagtaattccggaattatctgcgcctttggtcaaatccaccctttggtctccaaaggccaattcgtgcattcgttcgcggtttccaccaaaaatgaactgcgcaacagttcgtcttttcattacggcttttgggtttgcattcgggtccttaatacctcgtgctgccaaattttctgccatcttttgagcaatacttttggacttatcaataggctgcaccaccccacctttggttacttcaaagttgagtgaagcccgggttggatcatagttggccaagctgtctttggccttgttcttccattgttcgtccgaccaatttctttgctgctcattgctttccatttggctgatgccggaggttgtggatctcatatccatcacttgttttcttcctgccatattactgatttttcttcaaaataatcctgtttttctaccagagcttgctccacgaaggaactcgttagagtggtgcctaatcgcggttttgcaaaaacctctaattaggcttagagatttggaaaacctccttttgcgaccgctctgccatcactccagatggggagcaagctcttcgccttgggtgggctgcgctaccgatcgaatgagttggctgcatagctgaaaataagggggtcataactatagtacgaggtttgcgcatgaagttttaccaactgaaaagatgaggatgtttccttctttgtgcagtgtgatggctgacagacttacgagttcgtgaaggaagtctctgacagttggtttcgaccaattccattcctgtgcaagtcgctccaaagaatgtaccctgtattccggccttgcgttcatgtgtcctgacttttcataagcgagctgtcctttctgaatattttcgattatccacaaaaaagcatcatagcgcgaaagacgatgattgccttttgacttcaagcatttaatcaaatctttacccatagcaatccatgttatcgtggaatctatcgaagttggtgttattgtttccataattagtttgtttcttgaatgagtttatttttgttcccttttttaaatttttgttcttcgtcttcatccaaaacttcgcttattgcttcgtctatcaaacctttattaagcgcattcaaatgctcattaggtttccattctttcgttttgaatggaaagaaacaggcaaagattacgataaaggcaagagttgcagcacaagagaaaaaatgagggataaaagctaagacaatcgccaaaggtgacagtagcaggattggatattcggatttagcaagaaacatcaagaacttcatatttttctttgacatgaaacaaaagaatacatacagagaagatacgagcaatcctttttccaatggataaatggagtaatagatcatgtgaaacacacaaattgagacacccaagagggaagctacaaaaagccgggctttttccgaatacatcatccgaacagaaaaatgacgagatttgggcttgccatataacttccttgggattacgacaagagctgcaagcagaatcaacaaaaaaatattgcttagaaccatagtcaatgaaattaattaggaatgaataattttctaacctctcatgaatatatgcaagtcacatacaacctcgaaacaggtctaaatataacccataaaagggacttcacatctaccaggagagaacttaaaagttgaaccattctatgtaagatggatttttcccatacaagtaatacaatattaaaagagggaataaaaaacttcaatgcacacgcttttctaattcttagtaatatgagtaatattaaattcataaaatcggtgctgagtctgaataggtcatcttcaaatttaaaattttaaatgtacaacgtctgataatacactctacatcgtaaaccgagagagaaccttcttctaccctcttggagaagcctttgtcgcgtcttgcaatcttgcaaattactttttctatatctctttcgaagatataccaaaccttattctttctcttttcaaaaatacattcgatacgaagaacccggttgctcaccttaatgattcggccattgattatttcacaatattcgcgcaaatttttaggaatccgggcttcatatcgtttgctgttcgagttgataataattgcaatattttcaagaatattatccatcataatttagcttacaaaaaatagacaacaaatcctttctttccactcctgcaataatttcaaactcttcctgatgcgcttttatgtctgtttccaaatcttcttcccaaagttccatactatcaaataacgtaacaataatagtttctacatattcatttttgttcgtatggaaattgatcttgtacatcaaatgcccatcacgcggattggaaaaataacaaacatgatgaatctttaccaaggtcgcatgatacaatagtttcagatcccagttatcctccagcacatccattacatatcctaccgggaatgcttcattgaggtcaaagaacaataccgcagaatcttctgcaatgtctgtttccatttgccccttctcgatcaatgtcggccatgtaagcggagctaatgccatgaactttctaatttctttgtgtaacataatgctaaaaatttaaaacgataaaatatacaatttcaagaactgttgaggaagcaaatagttaagcgattgcaattctatatcaaaagcctttgcgaagttttgggactttgacaactgagaagatatttcgcggagattgcttttttccgcttctgtcaaggaagctattgtgagattatcaatactgatataaggttggataatcatccacagataagcattcctctgcaaagagttctgcatcggcaaatgatttatattgtcgatacagcgtaaagagttctgcaacaatcttcttgctgttctcatagacataattgcaattgcgtcacgggctttaatctttcgcacggatgctgccaagaaaatcttagcacaaacatcttctgtcatataggtaatatcagaaagagaatcgttacccatttcgtgaagatgtaaaagaaagcttctaaagcaatagtcttcatgccgaataaatttcagcaaatcgtctttattggaaaaaccctgaatctttgcttcatgcagaaagtcccgatattgcttcagaactttgttcttgttggaaggctttacctgtacggtattcaaggaactgaaaaaaggttcatattcacgaacggcagcgagcagagtctcatcgtctataaaaggagaagtctgctctttaatctgcataacgtcattataattgtaacgccaggtttctgtcaaccgtatcatttgattttttacagaatccttcatggctatgtactttccggccacaaccatgtctttcaccaagacagaatcctttgcaaggaatttctttaccgtatcgtttacctctctccactttttcagcatattgccaaaatcactcgtgtttgagcttttcagttctttgagttttgaatgaaaggattgatagcactcaatggcatcctccggcttatcgaaggaatactcacccgatttgccacaacccacgagtccgggcagcaccagaattgcaaacgaagcaatgccccctttgcattttcgaatcttcaaaaacaatttaattttcttcatataagattaggattatgtaaaactgtgcgtcaaagataaccataatcccttattcaattgatattttcccctatttttttggggtttttggttttagtattatcataaatagaaccaacaaaatataatattacccatctatttgtttaagtgaactttaaatgttaattttgcagcagataaaaacacaatcatgaaacatatcgcatacgggaatatagcccaacgaaatgaggaaaaagaagcaattattgattctttaaaaaaaatgaattgtcctgtttttatcgaatctgatattgacaacaggagagaaaaatggacggagtttatcgacatccttcaggaaggtgacacagcaatcatatattccttttcgaacacctttgtcaattaccacgatatgatattttttctgaagtattgctttacgcaagacatcagaattgtatcattggctgacaaactcgatacacaggatatactatttccagaaactcacacaaaggatgttctactgcttgtttgtaaaatgtttcttcagaagaaaaagagcatagacaatcttgaagctgattattcacaaagcaagagtgaggagaaacttaaacgctatatgttggttatcaatatgtatagttccgggtatagtatcaaagacattatgacgaagactgggtatagaggcaagagtaatatctaccggatcttaaagatgtacgatgttgacgtgtattaccctcagaaaataagaaaaacaacatccagttcaacccattagactaagtattcttttagtaaatcatcattgatagtaagaagaagaccgtttcaggcaaaagccaagaacggccttctttttcttttgataagtatctgattttcatgttattaaatttgctaacatgatattttatttgtatttttgcaatattaaaacaaccatacaaaccaaagaacaatcaaagggagaaaaacaaccctttttcctaaacctttaaataaaaatcaacgatggaactgacacaactacaatgggccaaaaccgggtacgtcttgaatgaagacgcagaaggcaaggaacgatggactaattgcttccataatgccaaagcagtatattattctgaaagcgaagtacaccccgatataacaggagcaaaagctattttatccgctaaaaagaaacaatatagacttgctatgaaagaacgtcagcaaaaaatcaaagagattgtagcaaaaaacaaagattacgaagagaaacgcgatgaaggtctaccactcccctctgacgcactggaaaatgtagaattgcctgtttatgccagatggcaagaagcatattccggcaacaatgcagtagttctgatttttgataccgaaactaccggattaaaagctgactataattctcttttgcaactctcttggcaagttgtagaggtcggaacatgggaagtgctgagcagaaagaacttctatttcaaatacccatccaatccttacagggtggaaagtaaggctatccttgcaaacaacctgacaccccaacgcttgaatgagttaggaaccacttctcttcaaaccgccctgtatattttcaatcaagacctaaaaggctgtgatttggtcgtaggtcacaatgtggcattcgatttatcttttgtcgaacatgcttcatacacgctatcctgccacctacatcgctatcttctcagcaatctttctgaatgtgccacttactgtacaatgttagccacaatagacttgtgccgtctgcccaataagaaaaatccggaagtcttcaaacgtccaggtcttatcgaactggcagcattccttggagtcggaaccaacgacctgaacctacatgattcagcctgtgacgtagaactcacgaagcgatgcttcagaaaattggtggaaatgaaacatgataaaagcatgatcaagtttttcctcgaaaaaactccggactaacatcaacaaaatacgatatgaaacacaacacaataaataagcttttattggcccttcctgggctgattctatcaacaagcatattgtctgcattttctttgttggcattttgcatgcggtctattcctatggcttttcttttggtaggcatttcagcattcggttggtctggaatactggcagctatcactaaattctacgacaagctgatgaatatatggcaaacaagaagttatcccttattcattggttcatggatgctgctgtctttcctcgtgagcatgagcttcggatttgaaaaaagtaacacatggaatatcagcgtatttaccctatccatccttgcatctatttcgatgccctgtctgattttcaaaaaaatcattgaaataagacttgaaaaccgtgtttcgcaagcaaaaaactcagattatgtagttctccataaaacctatgaacaagaaaacgcataaaattgcctataaaataaccaaagaccttagcatgatccggaagcgtaggggatttaccctacgcaatctttcacaagcttgtggcatatcctattcaaatctatgcaatatggagaactgcaagacgagtccttccttaaacaccttggtaaacgtctgtgaagcccttgatgcagaaatcctcattaaagaaaaaataagggaataaaaaaatgaaagatttgctttggaaaactcttgtaatcggtcttataataggatcgttattcctcctgaccacttatttcatcacttgctcaattatttccagacaactatgaaaagaatttcgttcaatgataagtacggcctgaccaaagcagtacttgaaggccggaaaacccaagagagaagaattatcacctgtccttctttttacaaaggaatagaagtacgcggtttctatgtatataagaatatggaaggcaaagcagtagatgcgactctgtatgacgaagacgaagaagtgatagctccctgcccacgttacgagataggagaagttttagctatagcccaaagttacaaagacttgggatataagcctcacgatttcttatacttgtctgaatcaaagggatgtggcttatctgccattgaagctcacgagctaaagggttggaataacaagcagtatattctctccgactttgagtatttgctatccaaacttcaaattaccaatatccgaatagaaaaactacaagacatatcagaggaagactgtatggccgaaggtattaggaaaatagaatcaaacaaaataagtaagtctttcggtttctacaatagctatgaaatacccaatcaattccctgttttcgactctcctcgtgaagcctattccttcctcactgagcaagtattcgggaaaggcacatgggaatcaaatccctgggtgtgggtatatgattttgaaatttacaagaaaacaatatgataaaacaaagttttgaaacaggtcatcacgaatgggaaaagcaaaatattgtaacccgaaaatacggaaaaaagctgtatgacatatatagatgcaagcactgcggtatagaagggaaatcataccaaataggaaccatctccattcagaacaaattctacaaaaaggcaccctgctgcctaggcatacaacagaaaaagcctacaaagctgaaagttttatgctgtacagctttctctccagagtttgataatatcattaaaggctgtattcttgacattctccctcccccatcgggtgaagacaataaacttggtgaatgggtgatgggcgtaagccaacctgttctcctgctcgatggagaatttgaatatatctaaatccattgtttctaatcctatcaacctaagaatcaatgaaaatacaactcattttagaaattaacgttcctgatggaataggaacgtatgaagatgctcttgaatacctacaatatgaaattggttttggagcaaatgcctgctcctgcgaaaatccatttatgttgtacgacaaagaagttccatacaatgtggtatcttatgaagattgtgaaattaacgattaaagggaacataaatacatagaaatgatatgatcacgacacttaaagaagtaacctcgaaagcccaaaaggaatacagatgtatgctttgtggctgtaaaatcgaagtcggccaagcctatatccgtcaaaccaatttgtatgatggtattgttgacgattttatcgctcacaaagaatgtaggtatcttattcaagagattgataaaatatctgagatacaagattttccaatggaatatggtatagatgaagattcatttgtagaatacatccactcctacgtttcagcgaaccactacgattcgtctatccacgacattgatttagactggcaaaccaataactatgaaattgtaaaaatgatcattgaagaagcactatccgaataagtccgcaagaataccaagttttcaatagttttcaaatacaatgattaacatgaatccccaatccgaacaactctccggccgatcaacggcatacgttgccacaaacgaaaatggcagttcttttatctatctgcacatgcccatacgaggtaaattcatccctaaatggttcccaatagacactaacttcttccctattgatagtgatgagttgagagaatctataggagaagataatataccttcatggaaagaagaaccgaaggaaatcaaaataacaataatattcaagccggtgaaagagtaaatacaccgaacccacaccacacaaaacacgaatacactatgaactttacattcaatgaaccggttttggttcgcaaccataaagatgagaagtggaatcttaattattttgagcgttatgtagaaaatgactactaccccttcaaaatgaacgatgagacattctatcggcaatgtattccctacgttggcaatgaagatctatgttacactacgctggaacctaaaactctccgcttatctaagaagattacccattatcgtccgaaattacatgagacctactttaccatttatttttgcgattatatcacagggtttggtgttatagcagatgaatggtggaataaccccggaactgatgaaatacgattaaaagccggccatgtattccgaactgaagcagaggcccaatccttttgcgagaaaataaacaacctcttaaaagaaaggagaccctaaagaaaaatgatatagccccaaccattaaacatctaattgccccaatatatgaaagagccaaaagaactctcacctatcgaagctgccagggaaatagaatatgagttacttactcaaaaattaagaaatatagttcaagaactcggtgaactaaataaaaaatatcctttttccaacttcaaggaaaaaaatggaaatccaagcttgaactatttggtttatatctcagctttaaaaaattcccaagatgaacgatttttaaaaattgatagatatatagacggaactaattacccacacgttggagaaacatttaaagcgttttcgactatggcattaagcgtcaatgaaggttatctactccgttcgatggccatcattcacagttttgccttagaaataaagagttccatcgcaaatgaaatagatgatttatttacgcaactgggatcagagattgtagaatacttttcagaaaaataagaaaatgaataatatatcacaatgagcataaacaataatatcagatttccaattaaatatgaaatcccatattagaaataacaaaaccatataggaagtatataatgttttagtaagtataaggtatgaatccacgagagttttacgatgcagttgtatcaatgagaaaagttcagaaaaggtacaaagaaagcaaatcacaagtagacttagatgaatgtacaagacttgaaaatatcattgatactgaaattaaacgagtagaattgattttgaaagcacagagaatgtttccaaccctggatttggtaccaatgaaaaccagagtaaaacatgaatgagacaaatcttaaattagtagcttcttgcaggagcctgtatgaagcgaaactatttcttaaaaaatgcgatgatttagggtatcattggaaagacggaacaaagttttccggaaatgagtattggcatttatataaagaatgcacttgttacaacatcttcgaaggaacattcggtgatattgagaattatatagaaaaaggctatgatatagtagactgcaagaaattttttaagaaaatatttcttcagcaatttgcagcagacaaattgcaaaagtttgaagaagttttagtccgaaaatcccctacctcgaaatggcaatatggcatatttgaaaaatgcgatcccaacaaccctaaatatccatttatgactttggttcctcaccatcagacatgggctgaatgtcctgaattcaaacagacaatgcaacagtgtcgaattcattgttagttaataatttatatttttcctttggggtcatgtaacccaatctttttctcggtcttgagtttaagatgttttgaacgcgcattacctgttcattggttatgtccctaaagtccgtacccttcgggaagtattgcctaatcaaaccattgctgttttcattggctcctctttcccacgagtggtatggttttgcaaagtaaacaaaaatatttagtttacgtgcaatttcttcgtgaaaactaaattcttttccattatctgccgttattgtatgtatttggtctctaaaaggttccaaggcatcgatggcagctttagttagcgggctggcatctttcccgctaagtagtcttatccatactagtccagttaccctgtcgtttatagttaatagtgctcctttgtgattcattccaatgactgtgtcaatttccaaatcaccaaaacgtactttcttgtctactatcgtaggacgcttgtctatgtccacgcggtttttgataaaaccacgtccattagtcaatgcacctctcttcttatgacttcttccccgtcttcttaaatgcttgtataacaacttatctccatgctttttatcttcccaaatatactggtagattgtctcatgagaaactgtttccaagccctttgttcgcataaacccagtcacttgttctggactgaaatctttctttatgagtatatctacttgaattttcaagtcgtccgtaaacttcacgaagtgctttcgtgaacgcattctggacatatacttagcctgagcgagatccggtttgtaaatgccattacgtttatcactattacgacgtaattcacgacttatagtgctacgatgaactcctacaagattggcaatctcggttcttgactttccgctttgcagataagcggaaatgttatacctttgttcttcggttagctgtttcatattgcaactgaatgttggggaactggaagatgcaaagaaacaacttttccacaggggaacaaaagggaaagaaatcttctttctctgttcctctgaaaaattattcttttcgtatcttctcattgtcatcattctcactcctgttgcattatccgcttgaacttaggtgtattccttttgatggaaatgaaaacttgtttgacttttccgtataggtcatatagagaaaaaaaagaatgcgtgtatttttgtacaagcattcttttttcatttactcaaactttaaaagcaactcttgtaagcgattatcttgcaatcgtttcaaagaaacaggagtaaagttaggctgctgccttactttcaaaaagccttctccaccaaacctactcaaatcaacctgaatatctgagagttcattgagagaaaaatagccgtattcatcttctatcaagccaacaactattccaaacaagaccgtatcgttgccttctttttcaccttcaagaatgaaccaccgcactcctccgagtgcaaagatggcacggcaaatagcttcctttcccttgccgtcctgggaatagagaggaaaacctttcaaggcttcctccaactgcgatgtcattagtctacacatatcaatcaaaaattatttcatcttcataaacttcaatttctgcaccactgctgaactgaaccacaaagccatgttcagagagggctacaatagttccacgatggtagccacgccaaggaattttcaactcacattgtctgccgtattccggaaaatcatattcatccataattctatcatttaatggttcggaaaattaggatcaaaaacaaaatcacattcaatgaggcgttgataggcttctgctgaaaagcgagcagccatttcattacgagcatcatatctaccatttttataattataagccagttccttcataaaacagaagaaaacttcaaacatttcctgctgcaaataacgatgagctttagccagctctttgcctgtattgtttttagaagacatttttccattaacgaaattaacaaatgattttacaaaatctgcatcacattttgaaatctgactgacgaaattactcataacaaaaagggattaaagggttaaaactaagagagtatttctccctctttggtaatacaaagatacaaaattatttccatgtatgcaaatatacatacgtttattttcatataaaagaggtgtttttttgcctggaaaattgggcgcaatttgggttggcgtttgcttccaaaagttttttattccctttattttattacttttattacctctattactttgtaatatggtattctatggtaatatagttaatacaagaagtaagggaaatatagaaaacagggagggaacaacggttgggccgtcagaaagcggatggtgaagtgagaatgaagtgaaacggaatcgaacctcaccttttgctttcgttctgcgaggctgccgtctgtcttgactttaggcaagaaggacagcagcctgaaaagcagaaccggctcaaacgttgtggtgtgggcagagttctaagaaagaagatagtaaaacagagtgtacctattcggcttgcagaacagctgcatgctgttttcagagttttagggaagatggatagaaatatagaatcttgagtgatgcgcgaagcgaagtctttggaatataaaaaagggaggaaaaaaatgaccgggtgggcagagttttaaagaaaaacgattttatctctttttcaaaagagataattattagatatagaataaattactatccaatatgaatgagaatatataacacataaaccttatttcatcaatagtcccaaaaggtttaataaacgaattattgtcagtacctaataaatagatactgacaataataattaaacaaacgaaatttcatgaatagcaatatagcaatcttcattgtcatccatgtattgagatactgcttcctctaaatccttcatcgttggagaaatctcacgattaactatttccgagatgcaatttgcaacctcttccatagtttcaaaatagtttgactcacaatctgtttcaacccaatatttctctggaaaaaataagccactagtatcattagtgctaaaaacaccacaacctgattcttcctctatgaagtaaactttaacagaagggaatttttcttctattatatttcttactccttcttgttcacaccacgcaacatattggtttattgtcagaacttcgtcatcaagagaataatctattattgcgccccgacatctatacttttcccaatcacctccaagtttggtaacaagattgccaagccacattttaccaaagccattctctattattgaagtctttcgcttatcaagcgatttcaagactttatatatagcctttacttctttcaaatcacccacacatttgtaggtacaatcacaccaattaggcatcgtaaacctcctctccatttgcgtatttatagacttttaattcatctgaaaccatccattgacagtttgatagcttgaacccatatttatcttcgattgttgagaggaaatcttcaaaatcatcatattgttcagattctatttgttcttcatctgtcagttcaataatatttaaacagccaagacaaaagtccaaaatataaacaaatttattgcccatacgtttaaaggttttagttgattaccgaaggaagtgtttctccctatcttgtactacaaaggtacaaaattatctgcatgtatgcaaatgcgcatacgtttattttcatataaaagaggtgtttttttgcctggaaaattgggcgcaatttgggttggcgtttgcttccaaaagttttttattccctttattttattacttttattacctctattactttgtaatatggtattctatggtaatatagttaatacaagaagtaagggaaatatagaaaacagggagggaacaacggttgggccgtcagaaagcggatggtgaagtgagaatgaagtgaaacggaatcgaacctcaccttttgctttcgttctgcgaggctgccgtctgtcttgactttaggcaagaaggacagcagcctgaaaagcagaaccggctcaaacgttgtggtgtgggcagagttctaagaaagaagatagcaaaacagaatgtacctattcggcttgccgaacagctgcattctgtttgcagagttttagagaaaagtgaataaaagcgtcagcgatgtaaagttagtagaaatataggaaaagggcggtgtactattgggtgggcagagaatataagataataaaaatagaacgagattctgtccgatgaaagcagacagcttcggcatagcaaaggaattctgactgatatagaacatattacaaagtaatatgaatattataagtaatataagaaacgcgagtattgaacatcatataaaaacttccaatggtagtaaaccctaccattggaaaataaaataagggcttatttcttcctttttggtactacaaaaatacgaaaaatatttattgtatgcaaataaacacacaatattttttttttattttcggtaaaatcaaatacaaaacatctggtcaattttacgaggtatttttcatttctttcttgtattacttctattacttgtaaatatgatatattttgaaaatatagaatgaaaggagggtataatgataccctatacttttggattcacccgcagatgcccgaagaaaaaaaacaaaattatgataccaaaaacattgaaaaaaagcatagaagtttgcttatatggaaacttttatatacctttgttgtataaattaaaggctatgaatgaaagaactataaaaatagtattaagtgatgatgctaaaaactttatcaaaattcaacctcttaaagcacaacaaaaaatagtctataatatcaaaaaagtagagggtggagttatggataaagaactattcaaaaagttggatgatactgatatatgggaattgcgtactttgtttaatggaatttgctatcggttgttatctttttgggataatgatgaaggagctttagtcatagttactcatgggataataaaaaagacacaaaaaactccttcaaaggaaattgccaaagccgaagcgataatgaaagaatactttaacgataaaaaataacagatatggcaaaaatgaatttcacaccggctgatgatttagtggatgaagtttggggaaaaatgggaactcccgaacgcgatgcaatggaagcccaactaaaagaagagataaatgcctactttgttggagaagctataaagaaagtgagacaactacaaaatctcacacaagaagagcttggcgaaaaggttggagtaaaaaaatcccaaatatcgaaacttgaaagcggtaaatgcgttattacactcccgacaatgagtcgaatttttcgagctttaggtattgctacggcctctttagatttaggtgctattggaaaagttaccctatggtaaatttcttatgttaaaaaaagagaggatatagataactattcctctcttttttatatctatacatataattggctttgctaagcaacaaaagacaaggcctcccataaaccatatatcattttttctgcgtcttccatatccgccactatatccttgatgtgatagggtgcgccttttttgccatgttcgtcttcaccaatccacagataggcttcataatctgggtcaaaatcctcgtaatactcttttatatcggcaataagggtctcaatattcccttgctgcatctcggcatagaaattaaaatcttgtccatacttagtgaaacgttgaaactcaaatgaaatgttcgacatttttttgtcatccacgcttacgtaccaacccttttcttgggcaatttcaattactttctgtatttgtttttgggtagtcatcttgcaagggtttaaagtggggaaactttttacatttccccataagtggttttaatctgttacttgaaaataatattcctgtttttcgtccgaccattcagaggtcatttcatccgcttccctccataacttatcatagagaacagctttttgattatctctctcataccattgccatatcttgtgattgaggacaagacaaagttccgtccaatatttaaaatcatctttccattcagattttatacactcataggtttcttcaatatcattgatgcccaatttgtcggcaatagagaagtcctgccaaaaagtggttataggttcatagccacttaactctgttatattccatttaggaatgccaatttgtaaaacttccatattttatatttatgtttaaattgattattgagggtttgtttctcctttttgatactacaaagccactctcttcatagcaagaaggattacttagtagaagtatcttctttatcaactgccggatagaacttagtagccaccatgattacacggttgtgtttgacaccatccttgtcagtccattcttcaggcttgaaatacccttcaacagtcagcagagttcctttactgatttgattaaaatcttcaagattctcattcttgcgccatgcctcacaaccaatgaatgcagaaacacgaatggtttcttcaccaactttttcctgtcggccaagaaccaacgagaaacgtgctactgacgatgttgtaaaattgcgaatttcagcgttattagctacaaaaccagaaaccgaaaagctattctcaatctttttcatattgcttatattttaaataatacttcgttaattagttcaagaagaattctttcttcctctttgatattacaaagatacaaaattattcttgcgtatgcaaatgtgcatacgtttattttagtataaaaatgaagtttttttgtcgggaaaattggatgcaaatttgaatgtcatttgcattgaatagtttttattccctttgttctatattacgtttattactcagtaatatcttattttatggtaatatagataatagatgaaataagggaaatatagaaaacagggaggggcgcaatggttgagccgtcagaaagcggaaggtgaagtgagaatgaagtgaaacggaatcgaacctcaccttttgctttcgttctgccaggctgctgcctttcttgactttaggcaagagtggcggcaacctgaaaagcagaaccggcttaaccgttgcggtgtgggcaatgttttaagaataaaatagtaaaacagagtgtacctattcggcttgccgaacagctgcattctgtttgcagagttttagggaaagtgaataaaagcgtcagcgatgtaaagttagtagaaatataggaaaagggcggtgtactaatgggtgggcagagtatataagataataaaaatagaacaagcttctgtctgctgaaagcagacaacttcagcatagcaatggaatcctgatatagcacatattacaaagtaatataaatattataagtaatataagaaacgcgagtgttgaacatcatataaaaacacccaatggcatagttctcagccattgggtggggattttaaggtttcaagttctcgtccaaagatcgcaatggaacgtaacctttgtgtaaatatgtcgtaggagcatttgatactttaagtccactatcaaatttcacattaacaaaagtccgaccattctcagtttcatattgtgaagccgtgtaacctacctccattttaggcaactcccagaagccccaattagttcgcgtcagatattccatcaaaattcgcacgttcttatgagtatatggaattaattcatgggattcaatcatggctgcgaactctttttcttgaacctccatacgttttatctcagctgcaaattgtgctactttttgtttttctttcagtgcaatctgttgtcttatataatcacctatagtgccattgtaatcaaaacatttagataaaaaaatttccattcccatagaacctataacagaacctgtattattataaattctgccatcaggggttcttaatgttacaaaacctgtttcagagatttctacactaaaaaccttttgtgaagttcgacttttatacaatttcataatataatcattataagtaaattgtgtaagcacgtaggtgctaatcttctttaggtttcacaaagaacgtttcaatacgttcttcggtcacatcgtcgcatatccaaatttcgcctccggaacaatgatccgccaaactggtgtacacttcgccgtgcacatcggcgcaaagctgctcgaacaaatcttgcgctttgacgcgtgttaaatgggtgtatttgcaaaaatcatactcgtcggttgaatatcctacgctgtacacctgctcatatgcttcgggcgtttcatctccttcgatgtcttgcgcaaagcaaaccaaaagcatttcggcttgattggccgagtaaaagcatatgatgcgctgcgcttcaaggcattctaatttttcgcacatatcaataaaggcttctcgctggccggaatcagttttcatgcacgttttgcgttcgaagattttaaaggtcacgccgtcctgtaagacttcttctgccacatcttgggcaagttcatcgtattccacgaggaaggggtcagcgttgaatgtgcaaaccgcaccgattaacaaactgtagtcgcccttactccaatcggctaaggcttgattcatcatttcgttgttcagggtctgaatattgtttgaatttttcattgtttcacctgcagaattttacctgttgccaccagtttttgaaataattaaaagaaaattgtaatgcagtagaagcccacctcggagttgaaccgagtaagcgaaccaacttcggtgggccaaggctctgtcttcagcgaatgggtcagaactaaaccatataattggtttaagttgatttattaaggagtttttctccttctttgataatacaaagatacgaaattatttccaagtatgcaaatttacatacatttattttagtgtaaaagtaatgtttttttatcataggaattgggtgcaaatttggatgacaattgcattaaattacttttactccctattttcattattactttatattctatatactatatatatggaacattttcaatattaatgagtatatttttccggtaatttattttgtcattacaaatagtattactatctttgcaacgtcaaacaagcaacatagacacgcaagtgtcattcacataaaacctatttatgggtgaattgtacccagaaaatataaactattcataaaagggcatcgtccgttcaagttatttttttatattcaaaatttgcttgtttgacaccggacggtgcccattttatatcaaaacgtcaaacaagcaacaaaatgattaaaacacaacaaatcagcaaaagccaatatacgttggctcgtcttcaaaaagaaataaaattcttagaagaatgcaccggaattctgattacaaggattcaagcaattgcaattagtattgcaagtattctattcgcaatatccataattctcccttctatgggggaaggcttagaaggctgggcagcagcatttttccttgcagctatactaagctgtaaagacactatgataagtattatcaaacaattgtaataaaaaatagggattatcatcatatgatgatatttcctattttttttaatgttttaccatatacttttcatctatatgataaagtttatgatgaaaaaaccggcactgaaaatacattcagacaccggttaatcaacaaccaatataattatgtaagaacctgtctactcaaaggaacctttagacaaaatcatattaccacatactaaagtccccattacaacagcattgccactcacaacagcattgtcttcaacaactgaactttgacctactactgcatgatccataatcaaggcattatcccttatcactgcacttccagaaataatagaattatctctaatttcagcataatcttcaatttgggctttatctttaattattgaattttgacaaactaacgcattatccgaaacctgcgcatttcccttcacaacagcattatttgtaatttggcaatttccgcttactactgaattatctgtcacaatagcataatcaacaactaaagcaaaatcagtaattttagcgttacctaaaatcattgcattatccattatcaatgaatttttctctactgttgcattttcgcacactacagcatcatcaaaaataaagcactcaccctcatgagaaaggttactttcgttctctacgaaaccaccaagctgtccggccttgacactaccaaaatcccggaaagccataattctatagagacgttttgacaagccatccgataaaacaatgtcctttgcttcctctgtaagtatatattttttatccataacaataataaatgtattctataatagctttatataattcgtaatacaaagatacaaaataattactacgtatgcaaatatacttacgtttattttagtataaaaatgaagtttttttgtcgggaaaattggatgcaaatttgaatgtcatttgcattgaatagtttttattccctttgttctatattacgtttattactcagtaatatcttattttatggtaatatagataatagatgaaataagggaaatatagaaaacagggaggggcgcaatggttgagccgtcagaaagcggaaggtgaagtgagaatgaagtgaaacggaatcgaacctcaccttttgctttcgttctgccaggctgctgcctttcttgactttaggcaagagtggcggcaacctgaaaagcagaaccggcttaaccgttgcggtgtgggcaaagttttaagaataaaatagtaaaacagagtgtacctattcggcttgccgaacagctgcattctgtttgcagagttttagggaaagtggatagaagtatagaaacttctgcgaagcgcgaagtatttggaaaatagaaagggatgaatcagaatgactgggcgggcagaatatataggactataaaacaactgtttttttcagcggagatattaggaacagtgatgcagttgttatagacgatattactatgaaatatggataattttaagaatataggtattcttctaaaaaaataatctcccaatggcagggtttgtgccattgggagaagtaatttattatttccagctggaggggatttcgttatagtccgtcagatctctgcagtataaaaaggactcggagtatgagaggtactaatcatccgtgctgcatattcattgatttgctccattgtcaaccattcgggctttaccggtaacatattccataatctgcgcatctcatctatatgctctctttcatcatttgcccaaattcgagatacttgatgataacgccaatctccatccgtaagatagcctatacagtcttcctttaagcgtgaaagcatcatgtactcgtgcctaaatttctcctgcaacttttcttcttttgtaatcgggttaacgatttcatattttgttgtaattggaaagttcggttctccgtcaatatcatcggatggggaacttgtataaagctgcggattatcagaatgaccgtcctcgatgtcaaagtatatttttccactctccttatcctcataggcaatattaccccaatagtttcttcccaatctctgcaatcttaatatcttttccatattctcttgttattctctataaaaattgtgtattgtcttactcactaattaactctccattctgtccaatccatagcattgcgtcttgaccgttgaaagtaaaatcgaacgctttgtttataggattatatctgccctctaaaaccgttccctctttcagacctcggatttcagccaagcaccaataacccatttcggtactgacttttactattgcttttgcttttatagtcttaatcatataatttgctatttaatagttagatactctctgtttggtatttgccacaaaggttttatttgaacctttgatatttatttcaccaaggttttcccaatctccgttagcccaagtctttgtgatgcacgagcctttgtacttgtcaagattggctttgatgagtttctttgcagtagcaagagaatcaaatgtaaatgtatcgtttacttcttcacattcaacatcatgttcccactctttgagttcttgattaaacttaacgccaagatacttatggcatacaggctcattgaaatatactgtgtattgtttcatttccaactgatttattatgagggcaattgctcaccctcgattgaacttattaaaaatatatagacgtttaagtcgattattaaaagattgtttcttcctttttgctactacaaagatacgaaaaactttttatgtatgcaaatatacatactataattttactacaatatgtaattattatttatcgccaatcccattgcgtcagagtaattatttccctttatttaccttattattcatattacttgtattacgaagtaacacaggtaatacagcattctgatgtaatagaatatatatagtattaacggttgaacacgataatgaaagggtgggtacagatcatagaatcgccacaaagcggaaggtgatggccgaagtgtaaaggacaagggcaaatgaaatctgaccttgggattgtaacagaagccaccacctttggctttgcgttctgcgagctttccgcgtctcttgtcttttaagacgagaggggcagaaagcatagaagcagaaccggcactatgatagggagggcagtagttttaagattaaatgtagcgagaatcggctgtagatacacgatgtagccgtatagtttcagctgattatcaatggtttcagctatagtaaagcagccatgctacaccgctacaactaaaaaaggcatatctaatatattcaaaaaaatattttatacgagccatacaattaatatagagtggaataatcatagaatcgttgtaaggatcagtgaattgatgagggcaagcgcgagctgccccccctaaaataaaacggagaaacaacaccgacccacagcgttctatgagcgcgttcgcccattcttgcatttatacaaaaatgggaaaatgcgcgaatagaatcggctctatgatggatagagcggtagttataatatgaaaatgtagcgaaaaactccgtttgctacaccgtgtatcagaattaaaactattgatattcaatactttacatattaataaatcattctgctacaccgctacaaccaaaaaaaacacatacttcatatattaaaaaaataattttttgaggcttaacataaagctctaaagcagccaaaggagaataagagaggttggaacgtaaacagttgggaatgagcagatttgcacaaagttgccaaatcgccataaagcaagcgagtgaggaatattgaagtagttcagttactaaatcgtgagccacagttacctatgcaaagcaggtaacaatgcggaaaggcaactttgtgcatcaacggattttattgcgctgattctcaatgttttgcgtatcaaggaacgcttacaaaatgattatatttgcacactcaaaatgtaagcgttatgaaaatcgaaaaattcaaggtgttgctctacctaaaaaagagcggaatggacaagaatggaaaagctcccatcatgggacgcatcacggtgaacaggactatggcgcagttctcctgcaagttgtcttgcactccatcgctttggaatcctcgtgccagccgattggagggcaagagcaaggaagccgtggaaaccaacaaggacatcgagcagttgttgctttccatccaaaaggctttcgatgtgcttgtggaaaagagaacggacttcgaggctaaggatgtcaaggaggccttgcagggcagcgtcaagacacagaccacccttctctccttcgtggacgagcatatcagtgaactcagcacccatgagggcatcgatatgtcgaagagcagtgtctggacttacagaaagattcgcaagaatctcgctgagttcatcggggagaagtataggttgactgatttggctttcggacagctgaccgagcctttcatcagtgactttcaccattacttgcttgacgagaaaggcttttcatcaggaaccatcaccatctatgtgtcgctcttcaagaagatgtgccgcatcgcctttgagcgaggcttgtgcaagaacctgctgttcgcccattatcgggttggcactccaaaggttacgacacccaagactctcagcatgtctgatttcataaaaatccgtgatgtggaactgcccgaagacaagccgagactatccgttagccgtgacctgtttcttttcgcctgctatgcaggaacagccttcatagacaccgtttccatcacgaaagccaatgtcaaggtattggaggatggtgacaaatggctcatctataaccgcaagaagaccggaacacttgcaagggtgaaactcctgcccgaggcgttggagctgatggcgaaatacgaggacggggcaagagataccctttttccattgctgagcacgaatcgtgttcgtatcgatctcatcaccatctgcaagttggcggaaacgagcaagacctattcctaccattcgggacgacactcgttcgccagtctcattacgctggaggctggtgtgccgatggagaccatctgcaagatgctcggtcacaaggatgtgaagatgacgcagcggtatgcgagagtaacccaaaagaagctgtttgaggacatggacaagttcatcgctgcaaccgagaaggactttattctcgcattatgaacaaggctttcaacttttctttttacagtttcaactacattattatattataaggacaacaactatgagcagaagtacattttctattttgccttacatcaacagacagaaggtgaaggcagacggaacagccaacatactttgccgcatcaccgttgacggcaaaagtgcagccatttccacaggcatatcctgtaccccacaggagtggaatgccaagaagggagaggtacggaacgcaagggacagcggacgattggcaagtttccttgctgaggtcaaggataaatacaactcacttctttccaccaacggcatcatcaccgtggaaatgctgaaggcagtgttgaaggacaaggacacgactggaaagttcttgctgagctttggtgataccatcgtggaatggtatcgaaccgcaaaagccagacaaacctttctgcacaagcggacatggcagaagaatctgagagactttgtccattcgttggataaggacgacatcgccttcgaggacattgacaagaatttcggggaggaatacaagctattcctgaaacgagaccagggacgtatcgacagctacgtgaaccattgccttctctggctgaacatgttgatgtacaaggcagtggacaggagcattatccgcttcaatcccatagccaagatagggtatgagaagaaggcagccccgaagatgacccatatcagcaaagcagacttcatcaagatgctctctaccccgatggctgacgagcgaacggagcttgcacgcagatgtttcatttttgcctcgctcacctccttatcctatatagatgtaaagaaactgtaccctcaccatatcagtgagaactccgatggcaggaagttcatccgcaaggaaagagagaagacaggcgtggagttcttcgtgccactccatccgatagccgagaagattctttcgctctacaataccacggacgacagcaagcctgtttttccactgggtgagaagaaagacatctatcttgatgtgcatacccttggaatggtgcttggcataagcaataagttgggattccacgccagccgccatacattcggagtcttgatgctcaacgaggacattcccatcggcagcatagccaagatgatgggacacgcagacatcacaagcacacaggtctatgcgcaggtgacggagcagaagatttcaaatgacatggataagcttattgccaagcgagaaaggaacagattatcgaacgaaaaaactattgaaaaatgaacagaggtattataactatcagcgagagcggaacggtatccatgccgaccgatactgtatggatgaccatgcaggagattgccgacatgtataatgtattcggctgctatgtgcgcaaggctgtcaaggctatattcaaggatggcattctgaaagagcagggtgtacgccgtcatgtcaggaagaacgaccgcatcagctatgatgtgtatagccttgaactcgtcattgcggtagccttccgtattgacagcattgagagcagagcctttcgggagttcatcatgcagtccgtcatcggcaggcagacaagccgcactaaactggtctgtatctttacagagaacgcaatggcatagacctgccataaagcaacgtttcttggaggctttgcgcctccagccacttgggcgaaccaccgcagtgtgttttagcatggtattagatttatacaggtaacacaaatgatacccggcaaacacgaccaactcggtatagccaataaaacgaggcgacaacctataacaaccacgctcggtaagttatacgttgtcgccttgttcatttcaccccactcatcaaggacatgtatttctcctacaagcccttcattctgtacgcctcacgatagttagccatcagaatcttctgaatgtcggactcgcggtagagtatctttccgccaagctggatatacgggatgacaccgttgtttcgatagtcctgcagggttcttcggctcagttgcagtctggcacaaagctccttgtccgtcatgaagcgctcaccgccaagcatgggacggtagttcataacggcacgttcaaaattgtcaaccattcggttgaggtggttcacgatgtggttcatccactcgctgtttcttgtcattacttcattgctcatagttgtctcgttttattgttgatacttacgttactcggtttacttgctgctatggataaagtggctgttgtatattgacagcctaacctgtgcgcttgcgaaagcgcatgtcctttttcttgtcctccactactgctacgatagccatcacgtcctccggcttgtagtaggtcttgtggctgatttgcgtataagccaaagttccgttgtcccgaagcgtctgcactgtccgtgggcagatgttgagcgtctgacacacgtcctgcgtgtcaagccacttgttcatggtcttgtcctcactgcgctcacggattctgtccatgcgcttcacgaagttctccaactgggcatcaagatagttgaatgcctcttcctcgaatacgatgaatcccatacttttcttttttctaagtcaatactatgttatatgtcgcaaagctccacgcatatgctgtgctccacgtttgtgagtgcaaagataaggcacggcaatctaaaaacaagcgttttcaatttctgtggcagtatgttgccggggtttgccgacttcaacgccaaaaacaacaagaaaaacttgcacgactgcaacgaatacatgaacaatgatgagttgagaaatacgttgaagttctcacaactatctcggtatgcaaataagcaagccacaactaaattgccacgttacacccaatcagttgcatggctgcactcagtacacttactttgcacccgacaatcggtcaatggtgcataccgtgaccactataccaacaatttaaacaagttaagctatggcaagaacaaaagaaacgaaaatgtttcctgaacagcaggagaaaatgacacaggaggtgatggcttcgcttcaaccatccacttatggtaaagactatgcccaaaaacatagctctttctttgaagaggtggagaactccgatttagaagttgtgacagagaatgtggctgcaacaacctccaacatggaggacgagctgacgaatgaggctcaatcgccaccgaatccgcagaagcgcatcagtggcaagcagcgcaaggcgacattggaggagtatcagcagaccttcctccaagttccaaggattgacgaccgcaagccagtcttcgtcagttccgatgtacgagaccgtcttgatcgtgtcgtccgcatcctcggagggagacgcatgagcgtatcgggcatcatcgagaacatcgtgcgccaccacctaagcctttatgaagaggacttcgaggcttggcgcaaattgtgagaattaaggtctgcgaccttggacgtggatagctgaaaggctgtagttccaactaacgtgttatgagagggagcgaggttatgttttgggaaccccaaaacgcctcgttccaccatgagggcggaggaactttgctcccgacggtcgcagaaagtgagtgtaccaactgtaaacagtatatcgaatgacaagcatacatgaacaatacaagaaaaagggcggaagaccgcccacgggcagggttcgcaagctgtcgaaatctgtcacggtgaagttctcaaagccaagctacgaggctttgagactgagggcgaggaaagccaaccgcaagttggcggagtacatccgtgagtccgccttgaacggcgaggtggtcagtggacacaacactgagacgatagccatcgccaagaatctcattggcatggcgaacaatctcaaccaacttgccaagctgtcgcatcaggcatcacaacacggacaatccacattgtcatatcgtgtataaccgcatcaataacgagggtaaactcttatcaggcaggaatgattacaggcgtaatgagcaggtgaccaaggctctaaaatccaggtatggactgacctacggaacggacaagagcaatactaacactcgcaaattgcgcaatgcggagcgtgccaaatacgagattcacaatgccgtcaatgatgcattggaagtcgcagatagctggcagaagttcaagaatgaacttgcaaaacgaggtgttcgcttggagcttgtctataaggacaaggagagaaccaaggtacaaggcatccgattctgtaaggacggatatagcttcaagggtacgcagattagccgaggctatagctttggcaagctgaatgcaaggtttgagggaatggagaaccatgtatcaccaaaatccagctctactctgcaatacgaacaaggctatcacaagagcaaacatgagccatccatgtcggatagcagccaagacccttgggacggcatttcttccattggactttttgcttctgccaactctcagacctttgagcctttcccagaggacgaatcatccaagaagaaaaagaagaaacgcagaagaggctttagcctttgatgcaagttacaaaccattcaaacaacaaaagaaatatgaaagaagaactattggaagccatctacggcacagttgagagattggagcagaaagtcgatgaactttctgcctcaccaaagaatacagaggcggaaagcactccagtctctgtaagtgttaatataagcaagcttgaacaagcaatccttgctatggctgtaaaagaaggggagtctattgacaaattggcaagattaagagaagctatctgcatctttaccgaccttaccaagaaagaagcaagtaacggagaacagcgaagcaaactcttgtttgatgcaattaatcaggtgaaacaagagctgaatgccacatcaaaaaatgtgcaggaaaaacttcacgcaatgggtaatacacctcaaaaaaagattgtcacccatcgtttcgagccaacttcaaagtatgttcttcttttcattggtggcttggctctatcccttgtaatttccatttggggcaattttacccaatggcgagagtaccaggattggggagaggcagacttgaaatatcgtgctttgaagatggtgcttccatctgacgaccccaatgttcgatacatagagaagtttttctctgtttgtcgagatgagaaagttattgatgatgtaaaaaatcgtgttgctgcttatgaggattctgtttaccatcactataaaatggtcaaaatggcagcaattaaagatagcattgctaatagcctatttaaagaggcgaatgaaattaaaaagaaaattaataagaaataatagacaacgaccatcggctacaagcgcatccttcgtttcgataaagtaaagacgaacggcattcgcatcgtgttcaatagtgcaagagcttgtccgtgcatcaacaacatagcagcatactgacttttcattaactctcatctgttcattcgcgtccgtgatgccacttgcttgacattgcggacactttttcttttatgatggttatgaagaagaaattggtaattatagcagttttggttatctcatttgttgcttcctatatattatgcggcacaggacaaaacgatgtaggtattgactctgttaaagccgaagaatatacggcagttttagaaaacagtattaacttggattccatagcaagggcatattttggtgtgttaccgactaatgtagaaacaaactcacgctaaatgcttatggcatctatcgtttgaagcagaaatctccaaacggattcggatgattgcgaagtattgaatgttttttttcaaagtgcttgacggctgcattctgatgcttgaacatccgcaaagtggtgacaatatattttgtaaggtgaagaatgactgcagcattattttgatagactcatttggtaatgaaccaaaagcaaaggatgttagttcttatatattaataaagtaaaaaatgccaaaatgcaatatattttaacgccttaacaacaaaaactgttaataatacataaataacgcattcgttatatatcgatttaaaataaatttcgtaaatttgcatcatttaaccaatagtacagtataaatatgaaaaagtatttagttttaatattattggcagtgattgtatcatcgtgccaagatgaaattcttaatgacagtaatcctgttattgagaacgtgaatgttaatttgtctatggatgaggcaatgagtattgcaaatgataatcctacaaatttatcagaggatgagattctggcaatggtaaatgatttttccacttcgttgggctcaaaaacaagaagtgctgccaatccaagaatgtctattgtgggctcatatcgcattggcggaattatatcaagcaagacaacaagagggactacgactgatagtattcctgtttatgaggtgtgtttacagtctggagaaaagagtgggtatgctttagtttctgccgactctcgaagtgctggtgttttggcatatatagaaaatggtaattttgagaaaaaagatagtactggggcatgtttgatgttaaaattggcagaagcttcaactgtttcagagataaataaaatagaaaggctcaaagttgagttacgagagaaaaccttgaagaaagtagcttcttgtttgggtaaatctacagtaacatatgaagaaataaaagatttgattgaggttaatggtgtaaaaagccatgaaacaacttcccgttctacagcttatgacaaacctttgagccagattatatcgttaatgcctcaaaatggtggagctgttttaaagaccgagtgggatcaagacaatccttataacttgttgttgcctaaaacttataatgaatatcatacggaaacaaattaccctatggggtgtgctattacagcaggagttcaaactttagcagctatcgctccgagcatgacgattgatggaacagtcatagactgggcatttgttactaaaaaaccgaaattgaagtatgattcgtattttggcggagattatgaggaggctatgatgatttccaaagtagttaagcatatgtatgaaggaacaaatacaacaccaaatattgatgaggattttaagtatgggccttatgatgatccgaatatacctcgtgtaaaaagtagtacaacttcagtttctaatttattggattatttaaagaagtatgtttcttgtggcacttattataataaatatgccccagatccattgttaaatacgataaatgcaaaccgccagatgccttgcgttgcaataatgggtggaacacatactgcaaatgaacaggcagaaaaaggttctcatgcttgggttatagatggatatgcaatttgcactaagacaagcagagaaattttacgaaataacgatttgtactttcatgctaatatgggatggggtggacctgacaatggcttttataaggtaaatgcagatgcttcgactgattttgagacaacattaggcacttataatataaatttttgggaaataacagaaattcataagaaataattagttttaattgcatttggtgtacaaagttatgtacatcaaatgctttattctattggcaaatatgaaaataattcaatacttttttcttttttttgtgttttctatagtatatggctgtagtaatggtactgatgtttcatcattgtgttttgaaaaagagtattacgaaaagccattattagaaaacccatcggaaattatgtttagtggtggaagcaacaatctttcagtcgaagtgtcagatgataatgttttggaagccactattgatgctggaaaaataaaaataaagacaaaaaagaatgggattgtttatcttgttgtaaaggataagacggagaatactagcgttactattagggttaaggtcgtggatagttacttaggtttgcaattaggcaaaccaattccgaactattctgtttataacgaagatgacagactttatttagtaaataataaaagtaaatcattttatttatatgataaatcttttaatttaaaagctactggcaattacaaactgtttgtgaaaaactcaaattattttctttctttagtcttttcagataaggtttgtttttataatatttcaaacagttcacatgcttttttatggggagccattcctacttatttagggtttttatggacgaatgaaggtcttacaactactaatgcacgagatgtatcacctgtcgttatgactgcttttgatttagacacaaataacgtttactattttaatgttgattctaccgaatttccttacgggatattaaattaaaacacaacagcaattagcaatatacaacacctttctgttgatgctattttgaatatgtagtgggaaaagcaaaactattatgtatgtagctatcactgagtgattatgtttggttgcttttacgaaaaaatgaagttaaatttctatgtaaaaaagtcctaatttccatatttctcttcttgtaaattatgggatattaagaaaaatatcgtatctttgtccccgaattgaggcgttctttgcatattgcaaaatacagaaacgagcagaagtccgctcgtttccatattgttacctatataatataggcaaacgcccaacttcttgattttcaatcaaagtccaaattagagcgagttacaatcataaactatattaccatcgaaatccaaggtggatttctgaaccccatgtttctgaatatatttattcgttgtggatatatcactgtgtcttgcttggtcacgagcaacgaccacaccctgagcgtttgccaaatcccgtatgccagaatctttcagactatagaactgataacagttgtcccactttagaactttcctcattttctgccatctcttattaaattgatctgcattacctctttctttatttggttttaaacttctcccgaacaaataaaaatcagagggatagttaaaaatattcaggtcaatcatcaatttgataatcgcacgattcaaacccacttccgcatctttgtggtttttactgaaatccttggaaacaaaaacagtctgattccttaatgaaatatcaccaacctttaaataactaagttctgtaggacgaatcaaagtatagtattgcatcatacaggcaagcaaaaacaacttgtcattctccgccaaatatacagacatctttttcagcatatcagccgacaagtctttgcggaatttatcatgttccggcataactttgatatgctctacaggattcacacttatgtattttctggcaatcataaattccgccaatccaaacaaccatgctctatagttgtttcttgttcttggagaactaccacgatccaaatatatccaatctaagaaatcattgcagaaagatgcatcaaattgataagcaaactttgtaggagtaaccaacgttcctatgtaatcacgcaatattttaatatgggatgaatagctctgacgagtttttttacgttccatacgatccacatagtctaaatacctgtttaaacaatcctctaagggtacgaatccgcggctttcatcaacaacaatccatggattccaaccttgactaagctgtttagtcagaacctctataatttcagctgctcttctctttttagctgccacagataatgcactattgatataataccttttacgccgcatctcattctttgctggatcaaaagcaaagaaatccacgaaccatcttgtacctttgtgtaaagtaggaaaagtataacctacgatagatgaagtattacctgtacgaaatttaggacacatttttttacatcttttaaaatccgcgatttcggtataaaagatgccggttaaacatatctattaaatctttggcgcaaaactggcgcacactttaaacgaaaaatagcgtaacttgctattttacagcttgctacgctatttcttgcggagagacaggtttctgaacttgtcagcctattctctctgtatatcagcgttataacatcaaggtaaagaacaaatgtagcaaaattgtagcacatttctgaaggctttttgaaacccttttgaatgcctatgccatcattttatcacggttcaaagatactaaaaaacgaacacattgccaaatgctttataataaatatttcagccactccactgctacactttttagtgcaaggtgcgagcctatttatatatataggcttgcaccttgcactaacggagactgtgtgtggcattgcaccaatgactacattcacaaacaacatcttacttccaaaaacttatatcagtcatttcccgattatggcgaatcatttggaaccatacaatatctgtattattcggaaggctttgccaaagaaatcatgtagatgtttgtgaaaaggctttcttgagacatttatgcttttcaaaatatagtttatacagaccttacctattgactatctcctattcggcaatggttgaaggtaaattagtgccattagctcctatagtgatgctaatggcactttttgacgccaattcactactgttcctgttgattttatgtctcttatattatttccctgaatttttagttgaacttgcttctacggaaatgttttgtgcccaagaaacaagaatttgcctgtttgggaaagataatctccgcttagaagctactaactttatatttatggaaaatataggaacaatgctaagaaagcaacgtgaattgaaaggtttttcacaagagtatgtagctggtttagtgggtgttagtacctctgtaatttcaaagattgagaccagtaaaaccaaggcaagatttgatgtaatcagcaacatttgcaaggctttggacatgaattggtacgatttactttccccagaggaaagacgcagtaaagaagactgccggatcaacctcaatatcaacgtttccagcccgcaacaactgaaagaataccttgacatattgggaaaagacaacttgcaaatcaagaatctaaagaacaaatagtatggaagtgataacgatagacagcattgcttttcaaaaactggttgaacagctcaaccggattgaaagctacgtggagcgtacaacagagttgtatcgtgatatagacgatgccttggaaataagcaccaaagacctgatgaccatcttctgtatctcagaatctacgctgtacagatggcggaaaggaggttccatcagtttcagatataccgaaaccggtggtgtacgtttttcatacagttccctgttcatggcaataaagtgtttccgcataaaaattccgggtatggcgaaggaggaagcactcaaacgactgtctgattataaagacgggattcttctgaacaaatgcacaactgaaaccaaatgatagacaaggaagatatactggaacgcacaggccgcgggcttgccgtgttcaaacattacatcaactttccggtgcgacccggaaaaaatttcaggaatccgctctacgaagaccggattgcttcatgcaatatctattatgaccggcatgcccaagtgttcaagatgaaggatttcggaaataacgaatattcgggagactgcttctggttcgtcggcatgctttacggattggacgtgaaaagagactttgtcgctatcattaaccgtattgtatcggacctgaacatcaccatagtccacacaggaaacaacgatatgcctgctcgtaaaaaggcagtagaaaaacgtatcatcatgaatgacaatgacaatccaataaggaaggattaccatacagaggttaaacccttttcagttgctgaacttgcatactggcagcaatatggaatcaagccggatactttggaaagatacaatgtacattccttaaagtcattcgaaggctacaaccgttccaataaaatttataaaatcagttcatctgcaacagaacccatgtttgcttacatgggcatgggatttaccaaggtttaccggcctcgaaatcagaatatgcggttcttttatggaggagagatgcctgaggtatactgtttcggtctggaacagctacccaacaagggggacatggtctttatcaccggaggagaaaaggatgtaatgtcacttgcctccaaaggattcaatgccgtttgtttcaacagtgaaacggccgccatacccacttcactgattgagatgtttgaccgtaagttccgtcatattgtctttctgtacgatatggacgatacaggccggaacgaatctgccagacgcatggatgaactgtcctcgtttcatgtactcagaatggaactgcctatatccggagcaaagggagaaaaggatatttccgattactttgcttccggaaaaagtgcagcggactttcaggtactgattacctccatgctggagaagctttactcacaaactatgatgcttttaaaatcttgcgaaatggactacaacaatcctcccgaatcttccaaaacagtggtttccgtcaacggagtaccgcttgggacctacgacaaccttctatgtataacaggtggtgaaggtaccggaaaaagcaatttcgtatcagccctgattgcaggtacacttgctgacgacacacaaaacatcgatacgcttggctttgaagtttcaccaaactactctgataaggccgtgttgcactatgataccgagcagtctgagtttcagttattcaagaatctgagcaagacaatcaaacgtatcggattacctgcaccaccggatttttaccatacgttctatctggcccctatgtcaagaaaggagcgtatcagcatgatccgtgacagcatggatttgtattaccaccggcacggaggaatccacctcgttgtactggatggcattgcagaccttatccgttcggccaatgatgaagcggaaagcattgccattgtggatgaagtgtaccgcctggccggcatctacaaaacctgtatcatctgtgtgctgcattttgtgcccaacggaataaaactgcgcgggcacatcggctcggagctgcagagaaaagcggcagccatcctctccattgagaaggatgagaatcctgtctattccgtagtcaaggcaatcaaagtccgtgacggcagtccgttggatgtacccatgctgcttttcacatgggacaaacagaaagatatgcacgtatctgccggtgaaaagccggccgaagacaaggagaaacggaaaaaggaggagttgcagggtatcataaaagaaatcttccgaagccggaagaaaatcacgtacactgaactcgtaaccgaactgatgcaggcgatggacatcaaggaaaggacagccaaaagctatatcagctacatgaaaacgaacggtatgctgaatcaggacagttcgaacaactaccagccttgatgcttccgccattgggaatagtcaatctaacaatttaatgcttatgagagaaatgaaacctacatgcgacccgaacggggtctattccgtcaaacgtgtatgcgccgagctgggcataagctacaagacactccggaaatacagggaaagcggctatatcaagccgctgaatccgggcaatgtctatcggcctaagtattccggacaatccatcattgattgctggcatgtcctatgcaccctctgaaacgaccaacagacttggactcccaccacaccagtccaagtctgttttcagaaaatagacacaaagcgaaattctatctttggttttcagataaggattccgctttgtgtcatctataaataacccgtgagcagactcatgggtcttcatctaaaacaatcccgtcatgtatgcaggcaaacagaaaaatccatcaaaactttcatttataagtatttcagtggacttagttttaatttaggctctctcccaaaaacgcaaaatgtcgaaatcagcaaaatgtttttagcggtttttgtcggaatcagcaaaatgtttggcatcaaaagagattgacgacagtcatccccctcttccgagcctcacggcaagtataataagtccctcctttctgttttccgtcataataggcaatcacaaagtttgaatgctgcagcatgaagtcatttcgtctgagcagacatcctttataataggtatcactcaacacaatcaccttgtctgccttggcaagtatatggtcatatcgttgctgttctgccaagtcccaacggctgttttgtcctctgaacggcacaacagctatcagttgcagataaggaagacgagctttgagggaaagaacttcctccgctgcgagcatgtcgaaacccaaagccatcccacagatacattggtactttccttccttataagcaagagaaacggcctttctgagccgttctctcaccttatctttctgttcgggtgcaatattccgatgccctgtaaaggctatggaagcctcctttatcgtaaatctttgtttcattgtctgcttactttatagtgagttttagccaggaagatgcccccgataacatgtgcgcccaaattctccaactggtcagcataggtagcccatgtgatgccgcgagtgataacatcatcaaatgtcactacggattttccactgaaccaatcttcatcaaaatcgatgatatgcactttgcggatttccttttccatcttccggttttcatgaatggcaagccgtccgccgattacccttacatgctcatagccgttgatagctccggtcagttcacaaaccctttcacaaaaagccttgtaacggagttcgttctttgaacttgtggatgccggaacttgaacgaaaacaatattcttgcaggattcgccgtattgttcctgcatgtttgctgcggtcatttgcgctaccgcttcaaagcttcttccgtctttgaaatcgtacaccatctgtctgtcggaaatttccttttcaccgacgttgcgaatacgcttgggaaaatacttgcagaaccatgtctgaggttttgccaactgcttcttgaggttattgtcaatctgtgccatacgctctgatttttttcccttctgttttgctgtttttcagcttgtccgaagggatattttttgcttttatcagagtgctggcagcccaataaggcaaattcagggcagaaaatacgctcaacttgtttgaggaagattttctgcaagggatttgacgtttggtgatgacagcaatacctttgcaaaaaaatatcctcgcaggcagagatgacaaaatagaactgtcaccgtctataccaatcctgtttctgaacttatacatcccataaacagaaatcgcaagtcattcccatataaatcattcaggaaagaccgaactcacctgggcaacaagtaatgagtaatacaaagtctttcaaaacatcacaatatccctcattatcaaagattttacctattgtaagaatggacctgcatgagtaactttacacccaaaagaatacttatgaactatatacagcaaatacaaacgattgtgatactcccggaaaaaagatattccgtgaaggaagcctgtatcttcctcggcatccaccggtgtaccatctatgactacatcagacatgaggaacgtccgcttccttttatccggatccataccgataaaagaggcatcgtattccagggaagcgacctgcttgcctataaagcggcaggtctccccaagaaagggcgcaaattcaaagacagcacatctcggtagaaggctgtctttgaatagtagtagaatgtggggtcagttccattggttccagggcaagcctgccagcaatgactttccgtcagcttccctcagttcgcaagccagtagccacgcatcagtccggatggcatccatgtcgtttaccgcctgctgataccgggaaggagccatagcacctgactgaatcatccattccccggcacaagtctcagggtcaatggcatccacaaaggattcaatctccttgataaggttctccaactttctatctttcatttcagcggtgaaggaaaacggaacaccgctcaaggttttccgatggaagtcaaagaaaagactgccatctacatactttacagaaacagtccagccaagcaaggctgcaatgctgaatacatttttatttctcataagacataaagctacatacagacctgccaagtccgtgatggatatggcaggtcactttcttgttacaaatcatacgttcaataacccattcttgcaaggaactcctgcagccggctgtcacgcaactttttcagtggcaccggatggaagttttcctgctgccttacttgcagcttgccgaagccttgtttggtcaaatccaactcaatgtccgaaagttcattcaaggaaatgtagccgtactcgtcctccatcagtccgatgacgataccgaaaaggatagtgtcgtttccttctttttcaccttcaaggatgaaccaccgcacaccaccgagcgcaaagatggcacggcaaatagcgtcctttcccttgccgtcttgggaatagagaggaaagcctttcaaggcttcctccaactgcgttgtcataagtctgcacatatcaatccaaaattatttcgtctttataaacatctatttctgcaccactgctgaactgaaccacaaaaccatgttcagagagggctacgatagttcctcggtggtagcctcgccaaggggttatcaactcgcattgtctgccgtattcgggaaagtcatattcgtccatagtcctgtcatttagaggttggaaattcggggtcaaaaatcaagtcacactcaatgagccgttgataggcttcagtggacagccgtgatgcccactcgttgcggtcatcgtatcttccctgctgatagttgtatgccagctgcttcatgaagccgaggaacaccttgaacatctgctgttgcaggtagcggtgagctttggtcagttccctgccagtctggtcaggtgaacacatactgccatttacaaagttggcaaactcttgtgcaaaagccttgtcacgttcggagatggtagctccggataattcgggataatccatagtcaaaacaatttagatggttgcgattccgattcttctccctcttgtgaagccctttagagcttcttggtcgggaaaaccgtttttcgtgcagttcctcactgcggacaacagggagaataaggcaagtgtgaggtccgaggactttacggaatacccaatttggcacaaattgtggaaggctaccggaaagtcctcagtccgaaagcgtcagcggcacttgacgtttctcccgtccgcagtacctttgcacggataaaacgagttggaccaagaagttccaaaggttttcaagactttcccgattaggactccaagggaaagaattagttctaacaggtcatctcaaacatattccttagaaagtccgcgtaacccagcatcccgaccgtcttgaagatgcacatccccgaaaaccgttgccgttgtgagaacctacaaagtgaagcgaagtggagccttgcaggttctctctatggcaacggattggagttccattcgcagccaaagccactcagccgagctttgcttggtgttgcagacacggagcaaaccggatggcgtatcctccccaaaaggtcgtcacttccggcattgtatgaaatacgaatagtcggaagtggtgaccaacatctgtgagctaactgtataaaccattcgatggctctacttccgcaagcgtcagcctgcgttcggtagagccatcgagcaagtcatcatttgcagatatgttttccaacctcattgacactgtgagaaacagctgagtggagcgaagtgaaaccctgctgcttctctctgtggcaatgaactggaactcccatcagtagtaatagcctgtcagccgggctttgcttggtgtcaccgacacggagcaaaccggatggcatatccttcccaaaaggtcgtcacttccggcatcgcataaaatacgataagtcggaagtggcggccaacatctgtgagctaactgcctaaaccatttgatggctctacttccgcaagcgtcagcctgcgtttggtagaaccatcgagcaagtcatcatttgtagatatgttctccaacctcattgacactgtgagaaacagctgagtggagcgaagtgaaaccctgctgcttctctctgtggcaatggaatggaacttctacttgtagcaaaatcctatcagccgggctttgcttggtattgcaaatacggagcaaaccggatggcatattcttcccaaaaggtcgtcacttccggcatcgcatacaatacgattagtcggaagtggcggccaacatccgtgagctaaccatataaaccattcgatggctctacttccgcaagcgtcagcctgcgttcggtagaaccatcgagcaaatcatcgtttgaagaccagcttcccaacctcattgacactgtgagaaacagctgagtggagcgaagtgaaaccctgctgcttctctctgtggcaatggaataaaacatgcaaaaaacgacaaacctaccatgctatgctccagcctgcatcaggtaagattaccgtttaataatcaatagatttctgtaacttcaaaaataagtttttacagcaaacaggaactgatcaatgaaaatctgtttgaatgctgcaatattgttctgttcatagaacatcagcattgcttttttatagtcaattgaatctacactgcggaatgagataggacaatagccgtaggcaatcaaaactccattgcttatgatgcgtgccgtgcgtttgttaccgtcagaaaatgcctgtatataggaaaggagcacaagagccaacaaagccttttcaaacacttcattcttgccgttaataagctgacaactgtcttcaagggcttccctgatttgaaattcattatcgagcggttgataatttgttccggttataccgacacgccgatgacggatatggcgttcgacccccagctccttaacaagcagcgcatggatttcctctatacgagttaacgatatttctttcagataatccggtacatcaaggataaagtcaagagcatccttatggttgagcagcatcacagcttcctctttggtctttccgttagcggtctgtttctctttcaacagacgttccgtttcaagtaatgaataagtattgccttcgatttgtgaggatttccatgacaggtctatacccaacctttccatctccttacgatattcaatatccgtcatttccgaaaggtgcaaacggaattttgactgtgcttcatgcaacaacgccagctcatcgtctgtaaacaaacgtacattcggcaatatgtcacgtatcaggtcaaagttaaaactttcctggaccgtgcgttcatcaatatccttgtcaaaataagtatcaagactgagtggcatggtcacatgagcttgaggagtgagtttgtatttggtagccggtcctttaccgaccacctcgatataccctttttccacacagtctgcaatgacacgctttaaggtacgttcgcttatctctgtagtgacagcatggcctatctccaaacgttttgaaagcggatgatagtgcaaatattgtaatatttcagtttctgttgtcatatctaaaaatcttaatcgggacaaatatactgctttctcgtagaaaatcgggtcaaattggcctgttttatgtctttaaaatcattgttttgtcccgattcaaatttaaattaaaatcatcagcacaagaatacaaatgaacaaacgatagaaaaatatcagtttgaatgagatgctgcagatggaatatttatagacctcaattcccaaataacgcagcagtcctgtcactgctgtctggcgcttgcaatgacagaactaccgcagaagtttctacttcctctttggcaggcggatttttcggttgtctgtttcccatttatccacatagttgttcagagcttcagagataacgtccttcaataaggcaccttccacaagagaaatgtacttcaccttttgaagtaaatccggatctacgatgaaggtggctcggatttcctggggtttcttggcacttttggctgattcgcctttcttggggcgacccacattctccctgcgtttggcttccagtttggacttcatctgctcagtagcagccatttcggttgtttctttcttagaagatgcttttgcttgtgcagcctttggattttcctgcttatcatcttgaactgcaagctgttcagtttgttcttcggtttgttcaacagcttgttccttaggctgttcctgcaccgattctgcttgattggcttcacccatgaagccatccatcaataaggataaattcttcttactcatattgtgtattttattacttgtttacttgctgattaacttactatgttaccaataacttttgtgattagtcatatagtaagatagtttatctattttcctcccgactgataatctcatcggtcagtgtctgatagtctgctgcaccattacttttcggttcgtactcaaagatggtctgaccagacagcggcatttcggctatggatatattctcccggattttcgtctgaaaaaccttctctccatatcgtttttccaccatggaaatcacttccctgttcaacttccggttattgaacctggtgaagaaaacaccgcctaattcaagcattgggtttaccctgcgtttcacttcccgaactatatcatccagcatggtcaagcctttcaagggcaaggcttcagcagtgagcggtatgtagagtttgtccgctgccaccagcgcattggttgtcacgataccgagtgagggcgaacagtccatcaagatgtagtcatacttctccttctgttcatcgaggtaggatttgagaatgccctcccttgccatcatggtagccatgtctatttcggctcttgccaagtccagtgatgctggaacaaggtccaggttttcacggatgggtacgataggcagcggttggtctttgaccagcgtatcatagatgcttgtttccgggtcttcgttctgcgtcagcgtgaacgtgagattctgctgtgcatccaggtcaacgagcagcacccgttttcctctcagggcaagtgctgcacctatacatgcggtagaagtagttttgccgactccacctttctgattgccgatggctattgttatattttttacttccatttttataggtttactatattactttactactatattattatactacaaatataatatattattttattattacataattagtttacctatattttattaaaaacaatacgctatttatatgttgtatatcacatatttacatcgttttttttcaaagggaataaaatatagatttacccacttaacttcaatgcgtaattaaacatattatcatgtaaattctattatataacaaatagatatttgcattagatttcattttaatatagtcagctatttctactatccaaaatataaaaactccgacccacacctcacggcggaagtcggagcggaacatatataaggaatttacgctgtctgtttggctgcgagtatctgatgggcatgggcattgaccagccggacaatccggtcgtggtgcggagtattcgtattgcacagcccacggctctgtatcactttcccctctgtcaaagaaaactcaatcgtctcgatgcggtttccttccttatcatgagccgatagtatcaagctgtccgccttggcatagtattcgcattggaagacacaatgatgcagggcatttccctcggcttggaaggcttccaacgtatcaagtaccgaaatcaccaggtctttgtcggtgatggtgataccgaagtagcgtgacttctccttgtagaactcggcttccttccgtttggctcgctgcatctgctcctggcttctgcgtttctgctccatttggttgtgtcggttcatccaatagtcatgctcggctctgaggttctgcggacagatatacctggggttgcagatgtccttgccacactgctccagcaagcggatggtgtctgcccacaatcccatgtccgaagggcggtagtgatgccgggtggctaccttatacgactgccagcatcggtcaagttccaaaggtcggtgtacaaagtaagacacgacatgtaaatcttttgacttgaggatggtttccatccggctgtccgtcagtacggctttcatcagtttcatcgggtggcagtcgggcagcttgcctttcatgccgttgcgtttcaattcgggtagcagccgatagtgcggataaacataggtgtctgcaatgagccaatggacttcggtcggtcgcttcaaggtgatttcggatgcccaatcaaagcagtccacataataacccaatgtccttgctcttgctgtgacagctaacttgccttcggcattgagccacagacggcatgcctcccagtagtctacctccataggcattcctttgcggaaggtcgtttccaagcggaagacccgttgcacctgcaaatggtctattacttcgagggaagaaaagtagcaggcttccttgagggtgcgtttgagggtgtcctttatctgtaagtgagtactgcaatgggggcagcataccgactttccttttccctcatagtcgaagtgcctgccacaatcgccacaggtacacttgtgtgcggaagtccggaagcagatatgtcctgccactttccgcactgcccatgtgagcactttggggcttaagacggtcagcttctcattggaagctgccacctgtttttctattttcgttcttgccttcatagttccatgccttgaaagagtgagagttcttgaatgggtttgggttgcggtttggctgccttgggtcggctgttgcgttgctgcaatttccgcatttcctcctcctggtatcgtttgagggcgatggctcgctgttctgccttctcctcctcggtcagttcgatgtgatgattcaccaccacattgcagtccatcggcttgccgatttccaaatcgggttcatctatcgcatggactgccatagcataaacctccatgtcgctgaaaccgcagcagccggattgctgtacggcatggaagatatagttgaccacatcgtcaatggtgcgtgtggtggtttcatacttggcacggaagagttcatcttccttggctcggttatcaagatagttttggatgagttccttgaaatggtcagttcctttcatatgttcctatgtttaagcgtaaaagatgttgattattctaatgctctcggcaatcagcctaccataacgtggcagtccaccacttcggcaggaagaccgaaagccggatagtgtgagaagtaagggaaacactctccctcttgttccgttgcggtagtgatacccatgactttattctctgtgtaccactggtcaatctgagcgatttcttcgtccgtcagtccggttgcatctgagttgaacagatagcagagtgcccatgtcgggatggcttcaatgagtgtatccatagcgttttctttttaagttcgttactccgtgaattagacgggaagcagttccagcagtttctttagtggaatggagttgatgtccgacttgaggaagtgaactatccattccggttcttcaaaaagcgggtgcatgggtaccacactgaaatcgtccccattggaatagcagtcgatttgtgcaaagttggcgccgtcctttcggatgtgagcatagaaaggaggcataccgcaaaagcacttgcggagactctctctgtcccactgcagggtaagttcgtaaacactgcccttgtagagcatcttttcttttcggtctttgagtttgtatgccatagctgaactaattttttcccttttgtttgaagccttagggcttctcactcccgggtgatttttacgatgcctcttctcacgaagggtgtaagggacggaaggcaaatgtggcaaggggaaagcagacggaatacccaatttggcacaaattgcggaaggctgccggctgctttccttgcagccaagcaaagcgccatttgacgccgtaccgacccttcgtacctttgtatcggaatattcatcgggagtggaaatgcctacctaaggaaagaatccgccagctgttaaagatgaatgtttaacttttaatctttccaaaatctcactatctttgcaagccctgaaaataaatgttcagaaaggcacggtaaagaacagacttaatcactctacaaatgaaagatcaaatacgtctattgcgagattgcttccataacgagattccggcagttgtattccagggaaatgacagctgtgccggagagatactggaagccgccaaaaagatttatcagaaacacggctgcagtcaggagttcctttacgactggcaaatgctcatcaacgaagtgaaggcttaccagcaagagagtccggaacaggtacagcttccccagctgacccataccgaagcagaacttattcgggaagaaatgagacagaaaggcatggtttactgatgcaacaaaaaagtcctgatgcgcatggatgaatggcatcaggacctcttgttttttcattgcctatgaatggcaaccacgtaaagtttttgattttatcttttcgaagccgccaacgacaatttcctgaactgcttcagcagcggttccatttcaagtgatacacagcgggcacgctggccggctgccttgtttcctttttcggcttgaagggctgcatccttttggaatgcctccatcttcatttggagttgtacgagtaattcattcataatctttacatttagaggttacattacctaatagatacttatcacgggtctgaacttatgcgcctggtccttcggagtttcctgaatggttcccgactgcatcgagaagagccaggccttgctgtccctttgtccctccacttcggtggaagtccacagccagcagtcatcgggctgcagactgagaggtaaaccaccgaccgcttcaatccgttggttgataaacccaatttgctgatagaggtaagtgagctgcttcaccgaagggatgtaggcggactggccatagcgccacatgtcgaagacataaacggctaagggagatttcacttcctcgtggcggtacatggcatgggtgttctcgttaccgtcttccttctccaatgaagctgacgtttcctgttcgacacccagactatcggcaaaggctgccgatgcgacgtccctgatagaaacggcatagcccaaagctttgatctccggattccggttcacatgatagacaatggccaccggttcctttttcgaggaagagaacttctctttagacaatacgctgccatccgagcagactacatcaccaacctggagggaagaagcgatagacctgtctccttcatggttacattcttcgcaggaggtaaataacatggttcctcctgtgagtatagcgcacagtaaatgtttcaagtttctcagtttcatagcagcggtatttcaaatgatttgactacaatttccgcctccttatcgaggatgaaccagtattcagagtgatacggttttccttttaaggtcttggcttcaaaatctatcttgaccttccatccgttgaacggcttcttttctttggctttttgcggatttgctccctccagttctccataagctatcaaagcccggaggttggtcatggcatccagctgacgggtgacctgatcactcattgcggtatcgtccttgtcgaggttctggaagtagtccgtttcctccatcaacttgtggccgtactgcatcaagtgcattgaaagggcagccttttcatgttgattgacatattccttgccgaataccgaatctgccttgctgatgcccttgatttggatggactccggattatcaacggttgctttcaaggctctctctgcgatttccaccgcccgtttctcgggtcggccggaacagctggcgaagtaaaacagtccgccccaaaagctgacggcggttaccagcatgataatcattttcattcccggtttcatatcttcacgatttggagtttgtcgggagaaaggccgagacgcttgcggtagatggtgccgtcatcacgatacatctccagttcgttggaggtgatttctttttcacagatttccttggcttctgtcagactcagctggtggccgccaatgttgcgccagatggcaaagttgcacggcgcctgctggttgctgtaattggagcagttgaaggctctcgtacccacccgaatatcaccgccacaatgcggacatttgccgatgacggactgcatgttgatggcaccattgtctgccagttccagcacggaagggaaggcttttccctccttggaagcaaagccgtccaacaggatgaagcggtgctccaacagttcggtgatttcttcgtcactcatcttgcggttgccgataatgccgttgatattcagcacacaggtaggttgttcggcgatgttgttctcacagcggtagcccttgcaggtctttaccacgttgccgccacacaagggacagcgaccgattattttcttttccatacgcttttgtttttggatgatttatttactatatgattctgttacttgttgctttgattactttcttatttccttacttgattactttgtgattagctgattagtaagttagtttacctatttaccatttcagactgtagccctggttccagtccgagatgataccgccgatgatgttcttgccggacatcacgttggcccatccttcgggatcaagcgaaaaccagaggtcgttccatgagagtgtgcgtacctgccaggccaggataaacaggtcggtgttgatggcttccaaacggctgaccacctcgttggcgatgtagtagcgttccgaagcgttcagcaggttcaccttgtgcttctcgttctttccgtcatctcctgtcacgtcatatttgcccgaagtcaccagctgtttcatgaagggaaagagtgccgtcatctgtgtggcagcatccgtcagctcatccgataccatggccgcaatgacggttcccttcagattgccgcccaccgatttgaggagcaggctgcagttctgcgggatttccttggccaccagttccccggcacgcttaatctggtagaggttctgcatggcaccctgcgcattcgaaaggtagtccagcatcttgtcttccacatggtgaatacgctctaacgaagcggttacggccacttccgctgcaatgattttctcctgcgtctttttgcggtccttgtggatcttcttcaaggctgcggtctgacctagtacggcagaagtcagcgccgggtcggtctgttgggcaaagagcggagtcttgcctatcaataagccaacagcagcgattaacaaggagcgtttccatcgtcttacattcatacgtttataatttagggcctgcatttctgcgttcggccaggttattgatttggtcctgtttggtcggatgcagccgcacctccatcggtttgttgagcagacagtcgttccagtccttgaaagccttgggtggaagccattgtcccatatcgtatctgaccgacaggtgttccttgacctgcacctgaaagggtcgctccggatcaagcaggaaggaacgtccgttcacttccacttccagactgtcacgggttcggttgattttcaaggggatgttctctaccagcgccatcatgcgcaagccgtagatacgaccgggcaggtcattgtcgaaacagtcaaacgggcgagctccgggaaagcggttcagcacctgccggatttgtccgtcagagaacgtgccgcccagtgataccagggcaatttcattggtcagctgcttccggttccattggtagaatgccatggcatcgaaagccgactcacagaagaagacactcttcaccacattcggatagccacctgacaagtcagccacccatgcagaagaactggaatcactcccagcagccttggacttgtaaccgccgtacccccgcatttcgtagccacggacctgattgttctctccgttggtataagggaagccgatgttgtagccgtcaaagttctcgttcttcctgtcgcggatgagccggatgaacggagcgaaggtgcgtaccgtttcatcggacaatcccctttgttggaagatggccggaatcttgtcgggatttatcggtttcacctcatacctggagctgtcgaaggtggcatgatacctggctgactgtacatactcccggtcctcgcggtattcaggttcgggcatgttggcaaagcgggacagcaccttggctatcttctgccattcatccttgcccgatacgttgaaggcattcaggttctcccggatgagtgtgaccacatcccccttggaaccgtcgcggcggaagaaccgctgggaagccttgtcctgggggtggcagattacgagcgcatcccgcttttccttgccatcacccaacaccagctccatgtagcggcccacaccggccttgcggtccagacggtagccgagcgcataggctacatcgtcgatgccaaccttggctttgaggtccttgaagtttaccttgtaatcagtcatggttcatggatttgaaggtatgattagaaactcattttcgctcccactgcctgcgtgcgcttgaggttggtcacttccggctcgaaagtcttgtgcgccgtcatgttcaggaaggctgccttgtccttgtagtccgtcagctggaagtaggtcttggccgtatctttcgataccttcttcaaccccagttccacaccgtcatacgaagcgcggatggcataatccccgttgcgtgtcttcacgatggctgcattcttgaacggcacctcttcgccttcgcccaacggggcaaacgggtcgttcttcgtcaggtagggctgttcgttgagagccagccgctgtttgtccacctggtccagaatcaggtccgaagccttgttcacgtccgccatgacggaaacgatgaacttcggttcctgcttcagcaccccaatccaggaatccagataggctgcggagttgtccgtcaccttcatgtcaaagcccatcgaatggcagatcatggcagccgtcagttccgccaccaattcttcttttgcgtatttcgggtctccgaaatgtccgcccatctcgcggttgagccgttcaggggtcatggtggagtgtgacatctcatgcagcatggtggaatagaactccatgccgccacggtagatttcctctggggtattgccgatattaaactgctccttcatgggcagcaccacgatgtctttagccggtgaatagaaagctccgtccacccgtttgtctgcctgtatggggcagagccagccttgcgtctcgatcatccggtcgagcgcggcatggacatacatgccttccttatcccgaagttcgggcaccttgaacttctccatgagtttctgcacccgttcgggctgcacctctgccagattggtctggtcgatgttgtacacggggaaagccttgaagaagggaatgacatccatgcctttcttctcctccttactcatggccttatactcctccgaactgaccttatggccgttcttgtccttgaccagcacgtcccaatagaccacggggaaggctttttcacctttcagtacatgggccttgaggttgtgcgcctgcttgaaggtgaggtacaccggcagccggtagccctgggcagcggtctgcagctggaggaagaaggaattggaacccgagtagttgcggcctcccacgttctgcgggagacctgcaaatccggatgcaccgccaatccagcctttcttccagtcggaagccttcatctgttccatgcgggctatcatcatttcggcaaagcggtcgatggctacctgtccggcattgccaaatgtgttagttccatacgccatagctttcgtcatccattacctgacggtccatctggtcgatgtccgtctgttcgacataaaactctgcggattcatccgaaggatccgtgccgtgggtctggcaccattccaaataatcctctgcattatcaccatccatcacaaagcggaggaaaccgattttacctgcctgaaggagttccaccaactcctcgtgtgtctttttagctgtcatatcttttcgtcttttattatttcttgaatattcgattgtttctcttgattttgttacattttcatggaagccgacttctccagtttgttggtcacggctgaaagcatgcccgtgatttccgtattgaggtacttggctgctatctgttcccgggtggcagtctttgccttgaagagcgagtagccgtcatcgaaggagagttcatgcttgctggtcttgcccttgtcgcccaggtccatcgacaccttccatttgttgtcggagtggtccttggccacacggactcctttggggtccactccttcgggaagctggtacttctcgtaggcagactgcaggtgcaggcgttccccgaagttcttctccacgagttgtgtgggactgaccacgcggtcgaagtaggcattcaggtcctcacgggatgccactgccgacatcttggtgtcacccatctgtacataaaacttatacttgccgtagtccggtcgctgctcgtccttttccttatagacattgaacttgtcgatggtaatggcaccatcaggaccagacaactgctttggcatttggtaggcttcttccgataccttcggcatcagcttagtcggataatacttctccatcagctggggcaccgtcatttccttcttctggtatgcggccaaatccgctgcgtccatcttctgcggcttcagctgtacgccgtccatcttggcggtaaagtaccagtctgccggattggtggtgctctggaaagcatggccgtggctgactttctcgccgttggcggtaatcatctgcggttcacgtggcttgcgttcctgcttggcttccgctttctgctcggcctgttgttcactcttgacttcggctttggcttccgtcttcttttccttggcaggtttctcctctgcagccgtcttgactgtcttggtaggctcttcctgcacagcccgttctttcttctttttcgccatagtttcctgattgaggttgttttcttttttcactttatcctggcttttcaaatcttccccggtcttttccctgggcttcttcatcagttccggccggtctatcgcctcgcagatggcgacccgttgaccggagcgaatcagcttgggcagatgcttgtccagttcatgacggggaaaggtcaggagtttgatggggtctttctctaaaggaagaatcttgtctgataccttcagcgccaatattaccgatgccttgagcgcatcttccttgtacatttcatagaaatctcctttacggaaaagcagcaccgcatcgggatgtttcttcttcaattcgttgaactgccggacaaagccgacatccttctctgcattcttcttgaccatagggaaaaggatttagagtttgagacctttggattgttcagctttcggagcatggagtttcaaagccctttcctgcgactgcttgtccaccacctgctggtattcccagcggttcttgtccgtcatcaccagtcccaggaactcgggatgctgctcgtcatagcggagcttctgctgtcgtacccactctttcatgtcgccctgaatgaccttgaagccctggggctctttcaaatccacaccgaccgacactttctcgccgcctacattcagctcaatgggttttccctcgcgtacctgctgcttctgctgcatgcccagtttgatgtcgttaaccttctccatgtccttgagtttctgctccagttgaacttccgtcacacggcgatggataacggatttggtttcgggatcgagttgcagatactgttgggtcttctcgccgttgacttccacggctttctggatgacctctcccttgttgagcctttctgcttcctgttccgtgaggcgcaacacctgattgcgttccttttccagtacggcacggacgggataagccataagcgccggattaccttgctggtcggtggtcagttgaagtttgaggggaagcgtgatgatgtctccgttccgggcactgatggacacctgcatgagtggggtgacctctccggatgccagtttctccctcacttcctgagggaggctgtcggccttctcccggtcaatgcccaatgccgccaacttctcatagggcagcctttcagaatgattgatgttgtgcattttcgtattgtttaagtaaaacgatatatttgcggtcggaaccgccttgaacacccgcaaaagtattgtcaaccctatcattgaaaagaaatgcacaacatcattctgaccgccgtgctgctgattcttggttccgcttcagcatcggcacagttctatacgattaccaaagagacggaaatccgtcctgaaaagcaacaaaaagtggctcctgataccctacagaggagtttgggcgcttatgagtcttgcaaaaaggcagaaaaggactcccttgccctagagctgcctgtgaaaccactttcggagctatatgcccgaaaagtttacgcaagggtgtcccacgaaaaagcgtctgataagggaactgaaaaaactgaggtttctgaacgaaaagaacttcctgcgctcactattcccaatctctatcaggaaatcatccgcaatggcatccggcatccgaagattgtactggcacaagccatactggaaacgggctggttccgttcaccgctctgtcggaaccggcacaacctgtttggactgacgaatcccaaaactgggaagtactatgagttcaaccactggacggaaagtgtcagggcttattacaccaaggtgcagtacaagtataaaggaggaaactacctgctgtggctgcacaagattggctatgcggaagacccaaggtatgtgcgtgaagtgatgaaagtagtaagtcaactatgatcaatcctgaactgacgatggagaagcaataaaaaccataatatgagtcgttaaaaatgtaaatggatgatgtaatctcatgaatactctttatctttaagttctaatacgtttatgcgatatggcatcagaatttatacagtcaaagggcattgcgatatacaatgcctctttttatgaaaacaggctggaagaaagtttgcaggccggaacctgtgcagtggacaactttctgtcttcaatggcttgtgccaatgaagaaactcaaaaaagaatgatatggggcacattgcttcatcttagaaaggtggctttcagcgatgattatacaaccatttttttaggagccagctataaccacatcttctcccatcctcacatccgttcacacttgaactatatgttcagaccgacggatgtcacagacttgctggattatgcttcgaggaactttcaggaaggtgacagcctgcaaaagtcattttgctacattgttctgcagctgctgctctcggaacatgtggtggtttccgatttgattcaacccgtctgtaagcaattacaggaactacatgaatgtatcagacagaatccaattccccgatacaagaatgcctatgtacgttattcgtttctgctatgctgttatcggattcagctatgtgacaagagtccaatggagaaagaagagctgtacatcttgttgtacaaggaatgaagaatcatcacccggattatttccgtgttctccggcattgtggtaggctgtgagtttactaactttgccagcctcacggccaacatgaaaggccatatcgaatttgcccatctgtatgtgaaagctgcccggacagataaagggaaacgaaacaaatatagcggtaaatctggagttgaccacttacagaaattagaagtagaaatgcagagacagtccgataaaaagaattcgtcattagatgaactatacagaattttattcaaataagaaaaggttcattgcatctgtacaatggaagttatttgtttgatttatttatcgaaaatatatattacaacgttaatcaaactttgactacttttgtaaaatacattcaacttatcatatgggtaaaaagaaaaataagaagagaaacctaaatacttgctatgtagaagtcgaaaaaaacttaggaatgtggcaggactatatgcaatatggtccgcaatacgacacgaacaatgattgtccgataaatccaggtgaatctgatatggtggaacaactttctttcaagaaactgtctgtagataccagaaaacaacttcgcgcaaccatggttaatttggttcttgattactggcaaacagaaaggctcatacctgaaggtgctatcattaaagagtttagaaacgcagctataaaggaagtctactatatttgcggacaatatgccaaggacagcgaagaattgaaatacatgttgaacgaatgtatagtttctaccatcaataaagaactgaaaaaagagaaacaaagcaacaaataataattaaagtcttgaccttaccagtaagaaggcgtgtttttctgcttttcttgtaattttttcctttaaaacgcattacaaagagaattccagatgtgagatgaataataaaattctgtagatgctatcatgtagttaacgaatatgtataaattgcataatggtacgtatatgtgatttattatgcgtttccagtgttgaaagtgaaatttatttttctttttgtttacgacaacaaaagaaaaccttatatttgccactggagctatacctcccattgtcggcatcggaatgatgtcttcaaccggataacatattccggaccatattctctcttttgtagctccgtccgcacctaccttacttcttcagcggacacaatccattggaaaggccggtaacctttcccatcattaaccttaatcacacaagcgatgaagcaactaatgctacttctattcggtgcaggagttgtgacagcgggtgcacagtcccccggcggtgtcaaaggaacagagttgtggttccagacactgcctgtgacggcagaccttcaaggcgcataccgctggatggatctcgcaggggattccgtgaaattgcgttctcttgaccgcaacggaaaaccgggaagcgaatacacccagacccgctccttcgcgccggcattcaattttcatccggcactgtacctttcaggaggaagctacggaaaaacagcttccttcaagttctccaacttttcacaggctactgtcttcagtgtctttgccctgcctcccgagagtcacgacaaggatatgctgctctattcccttgacgggaggaaaggcggcggctccatcctgtcaaaggacaaggccgtacgtgccaacggcacggagccgctggactacggaaaggacacgggagaagacctcttgttctcctcttctgacagacagtctgctacagacttccgggagtcttccgtccgcgtgctcacctatctgaagagcaaccgtcccggaacgggcctttggggagaaaactccgtatcgaatctgtttgtcggcggtacttattccgcatccaatccgcagttcagcaccggttatgatgcaacggcattcgggaacaaccgttttgacggctattcccccgaagtcatcatctacggacgttacctcaccccggcagaacgcaggaaagtggaaagctacctggccgtcaagtatggaatcaccctgaacaattcctatctggacagtgaaggcaacctgatatgggacaaggacgagaacttgggttatcaccaccgggtgacagccatcggctcggatgccgcttccgctctccaccagcccctctccaccacttcctacgaggaaggacccgtctatgccaccatgaaagcaaacgatactttccacgacggcaattcctatgcggagtcgtccgccagccgcctgctcgtcatggggcgtgaatacggtaatcccttgcctgacaaagggtacatcttctggggtgacgacaacggtccgctgaccacctacacttcaccggcagataccctgtggcacatcatgcaccgcacatggacggtacgcagcaatgtaccggcatcggcagacagcacctcggtacgctggaacggcacgggtatgaccgttacccggaaaggcttcctggacaccatcgagcaggactcaagtgcgaccgaagcctttgccgtcacaccggcactttccggccgtgaaggagccgtctccttctattgccccctcagccatcccactttcgacgcgggctttaccggctccggcggcaacacctgtgaatacggctaccgcttcgacagggaaggaaacgtctatgccatctccggcggacaggccggcgctactgctgtagccaccggagtcagcggcagtgccgtttccatccggagggaagacgggcaggtctatctccgcattgacggtatcggcagccagacgcgtaccatacccctgccagaagcctcaggttcaatgtcaggccttatccgggccgtcacctccgaagaaccgctgcgcatagccgctgtacgtaccggcggcatcggtgacacgggaaacatggcagaactcagccatgcgcttaccccggatgacgagttctcgcagtattgccgcaaccgaaccctgctgctcatcgatcccagcggggaaggcaggttcgatacggaagacatgatagccgtgaaatgctcccggccggacctcatgcgcggaaagaccgtattccacaacctgttctgggatctggacggcagcggcagcgatgtattcacctttgcctattatgacggactggcggcagatgccgttccgaccccgtccacctgtgaggacggcaagccccgcaatgacggcagcatcgacattgacatccgcatcggcacccccgtctatgactatgtactctcagccgatacggtagccggcgtacccaaggacgaaatcattgcaagcggcaagttcaccggagaggctcaccgcattgacggactggctcccggcacctatacgctgaaagtcacccagggtggcggcaacgacatctacggaacaggcggaccactatacaccacctacgtacacgacaagcggatcttcgcatccggagaagtttcctggacggtgacaggaaccaactccaactaccgcctcggtgtggaaccgagaatatccgacgacatcacgcagttcggctttgatgtgagaggtgacagggctcatatgattatcgacggacacacgagtcttacccagtttatccgcatcaaggaaggagacgtcctcacgctgggactggaaggcattaccgtatcgtacaagctcaacggcaaggtcatccgccgctttacccaatggaacatccgggcatggcgtttgtgcatcaagttcggaaccggtgaaacacatattaccggactgaccgtaaacggagagccgattcccgatttcacccattcgggcaatgtacaggttgagaatcccaagacaaacacggccctcttcacggtacatgtaggcagtgagtgcgacccgacactccccaatggaacagaaaagaaggaaggttccctcatcggctggtcagaccggcccggaaacggtgaaggaaacagccaaggaaacggtaacagggacgattcgttccaagtaaagcctgacggcacgaccggcatctttgatgtcgtgctggagcaggaccagcccggggatgtcacgctgatggtattcgacgcttccggcaaactggttcacgagcagttcatggaaggcggaacaaccaaacgttcgcgcttcgaggcacccgccccaggagtctatgtagtcaaggccatcggtccggattgggaaaaaacccggaagattatagccaaatagttcaactaaaaccgaaatatcatgaaacggacaattatcatcgccgcatcagccgtggcgctggcggcagccggcattgccggttcgcattatctgtccggccagtctccgaatgcgcagctccagatggaaacggcaccggaaatccggcaagaaaaatccgaagacagcggcaggaagaaagaagacggcagccgtcctgcaaaggcggcaactgcccaccgcacttcttccactccgatacaggcagcaggcacgacagccgcctatgccaccctccgctacggttcggtcggtattcccgaagggaagactgccgacaaccccgaggacaacatctttgaaatcaacctctcccggacaattccgtcggacgcccgcgtctggctgtgttacgagctgcagggtgcggatcactccggagccgtagccaagagcatcaacgaccgtccggccaccggcggttatatggccacggcatccgacggctggacccatgtccgcgaggagattcacccggcctggctgcatgaaggcgtcaaccgcgtacttttcacggctcccgaaggcaggagctattcggtacgcaacctgcatgtcgaaacggcatcgggacccgggcaggcacttacgctgtcacaaactccggtagtctatggcgacctggcctatgtgcacggcttcgtccgtaacggggttcggacggtcaaggcaggacataccgtacttacattgcaggacggcgagttcgaaggcatcgttcccgtatcgggcagcagcctcacgctcagtgccactaccgcctccggaaagaccctgaccgcttccttcccgacactgaagaaaggcaaggcagattatgaacgcgcttttcagactccggctgcccgaacggcagggaaacactttgcccaagacaaggcagacagcctgaaaaatgccaacggtgcgctgctggtagatcatggcgtcatgctggcagccagaaagctgaccatgcgtcctttgcgtgaaatggacctgccggcactggatttcggcatgaccaatgtcacagccgagggagaaggcgtacgtttcctgccgcacggcacacacttcacggaaaagggagccaccgtccggttgaagtacgaccgcacccgcattccgagcggctacaccgaagacgacatccgtacctattattttgacaacgacaccaaacactgggtggcgctggaaagagtgaaggtcgacaagcaggaagcctgcgtggtgtcacgaaccacccacttcacggatatgatcaatggcgtgattcaggcacccgaatcgccggagaccgaagggtttgcgccgaccatgatgaacgacatcaaggcagccgacccaacggccaaaatcaacctgattgctccgccgcaggccaacaaccgcggaacggccagcctgcagtatgcctttgagatgccgcctgcccgaaacggcatggccccctcactcggcatccagtacagcagcgagggcggcagcggctggctcggtgaaggatggagtctttccgtaccttccattacgctggacacccgatggggcgtgccgcgctatgacatggccggcgagacagaaacctacctgctctccggttccatgctctcgaccatggacgacaagggacagatgggtgtggcccaccgtggagacaagatgccccgcaaggcagaccggcagttctatacccgtcagggaggagacttcagccgtatcatccgcaagggcagcagcccatcagagtattactgggaagtcaccgacaagcagggtgtgaaatacacctatggcggtgaaggtgccgttctgaaaggcacgttcacggatgtttccggcaatacccgtgaggtgatttccgagtggaaactgcgccgggtagaagaaacacacggcgacttcatggaatatgtgtatgaggcagccgatgaagatatccgcggcggcttgaaagccaaggcgctctacctgaaagaggtgcgtgccggaaatgccggacaggagccccataccgtcgtgacgtttgaaggcggcaagacccggcaggtgaagaccaacaacgcccgttacggctatttgacctcttccaaccgcctgctggagaaagtgacggtgaacttccggggaaacgtgctcagaagctatgcctttgagtaccggaacggtgcgttcaaccgtgaactgctcgccggtgtgcgccacctggactctaacgggcaggaggtgtctttccagaagttcagctactacgacgacgtgcagtccgacaaggggtatgtccccttcaaggacagtcaggaaacatggaacacgcacaatgacgggctggatgccggatttgtcaatcccctgcaatccgtcaccaaacggttcagcgacaaaccgaccgcattgggaggtacggtaagttcttccaccagcggatcattctatgcgggtgtgggtccgaacgatttcagcaaatggaaaagcaacacatttggcggctcatacagctattccagtgacaacagtaaaggattatcatcttttgtcgatttgaatggtgacggtttgcctgacaaagttttccgcaaaggtggaaaggtattttatcgtccgcaactgaaaaatgcatcagacggaacggtttcttatggcgaagcgattaaggtttccggtatcaacagctttgctacggtcaagagttcaaccaactccggaggtgctaaaggagtggtcggatggaatatctttacagctgaactcggtttggacaagtcacgtaccaaaaccaagactaccgaatatttcagtgatataaacggagacggactggttgacctcgtttccaacggcaaggtttatttcaaccaccttgagtttgacagcaacggcaatgcggtaccgacattcacgttaagcagtgctgacactccgagtcccatcatctatagcggaaagattgacgcttcggtaattaccattgaccccgaagaacaggcggaagccatcaaatcttctcccatggaggacatcgtgcgcgtatggcaggctccccgggacggtatggtcagcatttccgggacggtcagcctgattgcacccgaaggtgactacgataaggaagaatatgtcaaggcagacggtgtgcgtgtatccatccagaaaggcaaagccgaaaaatggaacttgaaaattgctaagggagatgcttcggcacacccggcttctgtggacgcatttgagataaaaaaaggcgaacgcatctatttccgcgtgcagtccggtacggaagaaaagagcaacggtgcttttgacaaggtggcctggtcgcctgtcatcacctatgccggtacggctgagaccttgccgggtggctattccacaacggtttacaaacctgcggaaggtgcggtatatgatgtgaataccgttgccaatgtggaaggtgtttccttctctgtatcaggaaagtttagcaaacccgtcactacggatgatgtcgtgctgcgcattatcggttcaaacaacaaaaaggatgataacggcaacgacaatccgaattatacggagcaagtgctcttcacaaagacctatcccgcagcagagaaggcagatgccgtggaggtatcggccagtatcgccaatgccgagaagttcccgaacatagggtttgagattgcatcatcctccaatgtgaactgggagcagatccgctggataccatctgtgacctacaaggattcatcctccgttgaccggacgcttgcgattccggcacattacaggatgtttacccatgccgtgaaggaaagccattcctatacgtttgctgcaacggatacggcggtgattgtcaagcctcgtattacagtggcaaaaggattcaacggtgacgtgaccttgacggtaaagacagcggacaaactgctggcgaaaaagactttcaccataacagaaggtgctttgaaggcagatgtgctgaagctggaaaatcccggcaccgaaaaggtctggttcgagtatcattatcccggtacgttgtcggatgatgcccttaccgttgcacgtgtgctgttgcagtccgatacgctcggtctgccgaaggacagcgtgaacgccggattctatgccgaaggtgtcaacagcggtttcggtatgctgtaccgtggctggggcggcttcgtttacaatgcttccgagggacgctatggcaagcccattgacgaggctctgctcaaactcccggaggatgagaatgccaagattgacccgttgaccctgcctttcacaccgataggcacagaccagatgtctcccgaccgctggattggacagcgtcaggaaatctacctgacagctacagaagccggtacggcccgactggcagaacaggacgtggtcattaccaatccgttggataatcaggtggatgtcgcaggcctggcaggtgattgtctccagggaaccggtgcggcagctgttacccaagtcgctaccagcaagagttccgtaacccaaggcggcgccatgggatttaccgtcaacactgccgagggtaatgccacgacagatgtaaccatgatggacatgaacggtgacggttatccggatatcgttgccggaggagtggtacaatataccaattctcaaggtggtatcagtggtgagaagtcacagaagctggaaaaaatctccagtgaaaactcatccagttctaaaggttatggtggcaatccggttgcttctgtttcatccattgtcaagttaatcaaacattctcctcagacagcagccaattctcagaccaaatggcaagcccagttcagcctctccggaagcggctcatacaacaaggatgaagccgcagtacagttcattgatatgaatggagatggtcttcctgaccagatactgaagaacaagcaagtacgcataaatctgggatacacattctcagaccccatggattggggactggaacgcattcagggtggtgaaagcaaagctttcaatgctggtgccagcggtggtatgggcggagaattggttaaaggttcgtccattaacaaggcatccggtagctttatggccggattcggcattgtatcttctgaaaccaaggaagcgtacaacctgatggatgtcaactccgatggcttgcctgacaaggtttggaaagaaggcaacggaataaaggtgtctttcaataccggcaatgctttcctctcaccgataaactggaaaggcgccagtgcgttgagtgaatcagcttcaacttctgaatccgtcaatgctgcatttaccatcagcatcaacctgcttcttcctcccatcaagatttccactaacccgggtgcatccaccggtcacagcatcagccgccccacgtatgccttgcaggacgtggacggtgacggctatctcgacattgtggaatccgagaaggaaagcgagctgaaagtgacccgttccaccatcggcaggacgaacatgctgaaggcagtcaccaactcgctcggcggtacgtttacgctggactatgcacataccgctcccacctacgggcttcccggcggcaaatgggtgatgtcttccctcacggtggatgacggtatccatgacgacggtccgctcatgaccaccgcctttgaatacaaggacggcaagcgcgaccgccacgaacgcgagttcctcggcttcggcgaagtgattaccaggaatctcgacacagaaaaggaaaatgcgctctaccgcaagtccgtacagaagtatgacgtgtccggctactacacgcagggcaacctggtcaacgcttccgtggaagacgcagccggaaaggtttacaccgaaacacgcaacgaatatgacggctactacctgaccgccaagggtgacgagtacacctttaccgcacagcccgtactgtgcagtgaccgcgcttccgccttcgtaccgctccgctatacggcgaacctgcaatacgaaggtgccgcacagggaatgattacctcggaggcatggaacgagtattacctcaccggccaccacggtgagctgaaatcctacaggttcagcaacaagggcaagctcggcagcaagggagacggcaagtttgattaccagacctccatccgctatacctccaacagcagcaggaacatcctcggactgccgaccgatgtgaccgtgaccggaggagacggaaaggtttaccaccaggtatcggcggtatatgacacgaaatacccgaaccacctgaccaagataacgcagcagctcggaaacggcgaagccgtcaccgactaccgttatgacaactttggtaacatcctgcagaaaacacttccggccaatgccaagggacagcgcatgtggtacaagtaccgctacgagccggaaatgaacatgtatgtggaacgtgtggaagatgcgttcggctaccgcagcgaggcaggcaatttcgattaccgctacggcatcgccaaggaacgccgcgacctgaacaacttctactacgagaccgatgtggacgacctcggacgcatcaccggagtacgcggcccgaacgaactggctacgggtgtaccttatactatcgcattcgaatacagcccgaaggctgaatttgcggcaaacggcatcaccgccccggcatacgccgtgacgaagcactacgacatccagcatccaaacgatgacatggaaaccgtcaccttcgtggacggcttcggccggcccgtgcaggtgaagaaggacggcgtggtcacttcggcatccgaaggctcggtatccgatgcacagaacgtaatgattgtcagcggacgcaatgtctatgacgcattcggacgtgtcgctaaggcttactatcccgtcacggaagagctgggcaagcggacggacttcaacaaggcatttgacggagtatcgccgaccgtaacggtgtatgacgtactcgaccgtgccacggaagtgacccttcccgacgaatccaagacgctgacagcctataccacggatgcaggcagccgggcattggtaactaccgtgaccgatgctttgggcaacaagcaggctacctataccaacggcagcggcaagaccgtcatgaccaagcagctcagcggtcctgacggagaaatcaccaccaccttcgagtatgacggcatcgaccgtctggtcagagtcaccgacaccgaaggcaacgtgacgacctccgtatatgacatgggcgaccgccgcaccgaggtgaaccatcctgcaagcggcatcaccacctttacctatgatgcactcggcaatgtgctgaccaagcagacagccaaccttgccaaggaaggcaagtccattacctacgactacgattatcaccggctgacgggcatcaactatcccgaccacccggagaacaacgtgaagtattactatggcggacgcaacgcctcgcagaaccgcatcggtcgcctgatgctccgtgaggacggaacgggagccatcgagtacttctacggcaagatgggcgaagtcaccaagacccgccgcacgctgattgtgcccaaccaggcgattgccacctatgtgacgcagtggacctacgacagccacaaccgtcttttggagatgatatacccggatgaggagaaggtcacttactcctacaacctcggcggtcagctggagaaggtacgcggctacaagtcctatggctatgactacgtgaaccgcatcggctatgacaagttcgagcagcgcacctacctgaaatactgcaacggtgcggagaccttctacacctacgagcccgcacgccgcaggctgcagaatctgacggtcaacgcaggcggcaagtccatcatggacaatggctatacctacgatgccgtaagcaacgtgctcagcgttgccaacaaggccgcacttcccgaaagcggaaaggcgggcggacagatggcgcatgcctatacgtatgacgcactctaccgtctggcaagtgctacgggaacctatgccggagcggacagcaagaccgcttcctaccggctggagatgggctacgacaacatgcaccgcatcgtgtcgaagaagcagcatctcacgcagcagggcgtgcagttcgacggtacgctccatgtgggctatgagctggcctatacctacggcaagactgagggcaagaagttccagctggccgaagtgaaggatgcgaactaccgcacggaagagaatccggattccgtggccaaggtggacaacaaccatacctatacttacgatgccaacggcaacctggtctatgtcaatacaggccgcatcaagcaggatggcacattggattccacggcagccgagcgcaagctccgctgggacgaggagaaccgcctgacggcttccgatgataacggcttcgtgaccaactactggtatgatgccgacggtgaacggacggtgaagacctccggtgagggtgaacatctctacgtgaactccgagtttgcgggcggacgcaccaacacggctaagttctcgctctacgtcagtccttatctggtagccaaccagggcggacgctacaccaagcacatctatatcggttcgcagcgcatcgtttccaagattggcgacttcgcctcctacggttccgacccgagacgcatccagtatgccggcagtgagacggacggactttctgttaattacaaacaaaaatattccgcccaacagcaggtaattaaggataattatgctatctttgaggtgccgtacaacggaacggacaacaacgactatgtggacggacagggattctgctgcgacgacggttctcccgaggctgcgcaggcccgtgctttggcactggaaaacaacttccaggatccggacgcatacgagaagttgcagttctactaccatcccgaccacttgggcagcagcagctacatcaccaatttggacggagaggtggttcagcacatcgagtacgtaccgttcggtgaagtgtttatggaagaacgaaacaacatatggaatacgccttatctcttcaacgcgaaggaattcgatgaggagacgggattgtattactatggtgcgaggtattatgattcgaggctgagtttgtggatttctacggatcctttgcaggaaaaatatgtaaatatcacgagttattgttatacttataataatcctgttattttcattgatcctgatggaagacatgtagaagtaacaaaatctaaggatggttcatatgtagttagtggaggtaaagcaaataaagatcaaaatatatatgaaaattacggattgaagaatcaacgtgttattggaaagatgcttactcagtattcgtttatgaatgatgatgggaatgctataaaaggatccataatagatttgtctgataaatcaggggaagaatttctttctgatttcatgaataataccccttcccttatcgattatatgcctaatgcaataggcggagaaaagtatgatttcaaaagaaatggtactgaatatggtgataataactacaacaattcattatatcatcatcgaggtatgattgtaagcattgacaataaaaagtatattgcatctgctagagatatcgggaattttgcagcaggatatattgctggaaaaaatgatttgtcatgggctattgcaagattaggttttgatttactcgaaaccaagcaacacatgtcaaaaggtgaatttggtttctttaaagaaggaaatcccactagatatgcagaaaaagctggcttcgatgttggacgaatgacagatattgcaaaagctataagaaaggcaaagctttatcggtcaatgtatcctccaagaatatggtaaaactaaatttgaatacaagaaacgttataattggacttagtttgttgctttattctgtggcattacttaaccctatgtattatgtaacatcagaaataagtaatacgggaagttcgtgttgtagcgtttcttgtttacatacatttcttactggaatattagctactccttttgatttactatttctatgtaatggcaatatagaattttcattaatatggatatttaatattgtttatatatataatatatatgaggggaaaaaagtactaaacaataaaattattaaatcaataaatatattctctataataatgattatttgtttctattcttgccattcaaatatttcagatagagacggagacatagtttattatgttggagaaaagggagttggatattttctttggagttctagtcttatcattgtctttttgctgaatattttctcgccagacttttttaaaagtaagcgaaacaaacctactaaagattattttaggaaatgtcagaattaaaacattacatctaaaagtcatagttttcttgatgtatatagttttcacttagtcatctctcaagaatatccttatctgttgatatttagcaaattggtctataaaagtttttttataaatctgcaagttttagcgttttcacgtcaataaacttgcagattttatgattaaaaagtcgaataatacctcttctttattcagcagcctgtcagatatgctgaatcaatctcacccaccttatcagttgactgacaaaatagattagaaaatatttgaaacagtttgtcagtcaaccattatattgttaggacaatggtcgttctggcaagccaatccgtttaatgtgtggtatgctcatcctaaaaacactttcgtaatctctcaggtgagtctttggctctgcaaatttctgccgatgaagtattgattgaagccatcactccaactggggtaattcgtgctgctcaaacccttcaacaattggcagaaggttatgcagaaggaacggaggcattcgaagctttgacgctgacagactggcctgcctttaaagtgcgcggttttatgcacgatttcggccggtcatttatagcctatgatgaaatcaagaagcaagtgaatcttttagcccgttttaaggtaaatgtatttcattggcatctgacagattacaccggatggcgtttcgaggttaaagcttacccccaattgaccgttgccgagaacaatatacgccagccggggtgctactacacacaggaacagtgtcgtgaacttgtagcttatgcggcagagcgaggcgtgacggtgattccggagattgatatgccggggcatagtcatgtgttccagaaagcaatggggtatgatatgcaaactgagcaaggagtggctgcactcaaaaagatattggacgaagctgccgacgtttttcagggtgttccttatattcatataggaggcgatgaagtaaacattacatatcctcagtttctggaaacaatgtcaaagtatgtgcgcaataaaggcctgaaagtgattctttggaatcgtttggttgcaggacctccgactgcatctgtctgtgatttgacacaaatgtgggccacgtcgggtaaagtcgtaaaagagcttcccaatattgattgccgctataactacaccaaccactttgatgtgtatgctgacttggtgggcatttacaagagcaatatttattacgaacgtcagggcactcccgaagttgcaggaacaatatctgctgcgtggaacgatacaaagacacgtacggatgccgacatcgtctgccagaataacatttatgcaaacattcttgcctctacagagcgtgcttggtatggcggtggtgaacagtatatagaaaaaggcggaactacactgcccaatgaaggtgctgaatacgatgagtttgttgacttcgaacgacgtttcctttttcataaagcacattcgctgaaaaatgagcctatagcttatgtgaagcaaaccaatgtgcgctggcgcattacggacccattccccaatggtggaaatcatgcttttgcccttccccccgaaacgagcaatgccgatatacttccctccggctttgaatatcaagggaaaacctatgccacacgtattgcaacgggtgcaggtatttatttgcgccatatttggcatcctacagtgccttctttctttacttcaccggccaataatcaaactgcttatgcttggacctacgtttattcacccatagaacaggatgccggtgcacaaatcgaattttacacctatagccgttcgggcaacgaaaaaggccctaaaaccggtgcttgggatcgtcgaggttcgaaaatttggctcaacggagctgagattgcagcacccgtctgggaacagcccgatgcaaacattcagcaaaatcatgcgactcaaggactgaccaatgaaaatcttacggcacgcgaggtggttaaggtccatcttcgcaagggctggaacaaagtgttccttcgtttgccgcatgtcaacaacggtggaaccggccgtgacaaatggcagtttacctttgtgctgaccgacccgaccggtaaacaagcactcgatggcattgtttattcgccaaacaaatgtattgacgatgcggccgaccaacttgcttcacgtattgatgaaattagttattatcttgatactcattatagtaataacctagggttttatcccgaatcccttgctcttccgcttcgtaagcagttagaacaggtgcgcaccactctacaagacagcttgacagcaacggaacgtgaagcccaacgcaatgaattggatgctgtgtttgacaaactaaaaaaagaagaagaatccacctcattgaatatgccgaaaatcagtgagcaggcagaacgtcatggctattctttctgtaccccactgcgcggtaatcgttaccccactgcaaagggagataatcagcctcttgtcggtgaagaatcctttgacaaacaaactgccacatggctgtttcgtttgcgcaaagatggtagttacaacatcgaaaatgcctcaaacggattgtatatttcgcccgacagccctaataatcaggcactccgtacagttgccaatactcctgcaaaaggatggactttaaagccttccaatgaattaggctatttcatcattacctcaggaacggtacaatttaatcaaacgaacaatagcggacaaggctatcacattttcaattggggtggcggaacgaatacttccgacacgggatgcaaataccagattacccatgtattcagtgaaggaggctcaacctctgtcggttcataccctacgataaatcccaacgatttaccttctcctgtttactatgacttgtcaggtcgccgggtttatcaccccacgcgcggtttttatattctgaatggtcagaaggtgctgttgaaataaaggtaatttttttaggtgacttagcttttttatgctatatgccgggctggctttcttggcaaggtcagcccgatttacttttgtcaattgtctagttgcatggcaatattgaggaatttatcgtttaactattctttcggatttaaccttgccagtttacataatccgataagatgcatattacggctaaatctgccgcactttcgttgttgtttaaaagttgtcggttcttgtgtctccatatcaacggatgatgcgccgttctgcaggattgtcagaactttttagataaccagatggaaaatactattatcgtatagaaaggcttaacacctgtagttcttcgcttacacctttgcaacaacatatcaagcacatctttatcggctcacagcgtattgcctgtgtttttcaagattgctaatacgctttttatgtcctaaccgatacgcattcagtagtttggttgtatgacaaaaccacctttccgttaaagataaacaaaaaaaatctactcaatagcaggttattaaagataattacggtatctttgccgacagtacaatgaaaaggacaataacggctaaatatgaggtcagaatttgcttttggcactatcggacacactcggaatttcgcaacatactttgcattttgtttgctggcataacaaatctgccgcgatgacagttctatcgaatttgcataaatccgtgtatgggcattgaaagctatcttctgagttcgtacgcacatgaaaacttgcatttctattctcactttgatcatgttagcaataattgcatctcaaattaggtcgaagatgattttgtatatctaatacatgctaatcggcaaaaaacattaaacgcagcagttttttttcaatgcggaaacagatgctgcggaaaagaaatcacaagttttgggctgttaactattaaccgatttaatccaatactacccctttgggtattactcaatcacattccatttcatccaatttattatcacaatgcgaaaaattctgttgacgctctctttcctttgtctgggagcactatcggcatttgccgatctgccgtttcgtaatcatcgttacgacgcatttaaagtgctgaagattacccctgaacatacagtgttcgttggtaacagtattacgaacatgcatgaatggtgggaagcctttggcaacctgaaaattattaaccgaggcgtttccggagccgtaagcaatgaaatgctggccaacttggaaagtgtggtagcaggcagaccgaaacaaatcttctttatgatcggtaccaatgacctgggcaccgcaggactcaacacggctgcacaagtggcacgcaatgtgcgcacgacattaaagcgctgccagttggaaacgcccgaaactcaactgtttgtgcagagtattctacccagccgtcaacgtaatctggccctccaaaaagaaaccaatgacagtttgaagaaaatctgtacggagatgaaggttacttacattgacctatggaatgacctgctcagcgtatctgaatccaacaataacagccatacattggacggtcttcatctgacggcatcaggatatcgcatttggtgtaacaaaattgcccggtatgtgggttccgagtgcgtttatcctgcttcggcaccagacaatgcttgcaatctgggcggttcctacggtatgcgtgccacctatttcagtatgcttcctgtttgtaaggacgacatcctgctgataggtgatgctactattcacggtggagaatggcacgaactgctacattccgacaaagtgaagagtcgtggtacgggttggggctatcccggaccggacatcgctacgattcagaaaatgattagtggtatcttcaagggacgttccgataatgaggaacccgctcagatttatctctatatcggtacggctgacttgaataacaccaacaaaaccgttgatgccgtagtagcagaataccgaactttggtaggcgaaatccgcaagcaagcccctaacgctcccatctatgtgcaggctattctgcccaaaagtgatgcagcctccaacaccaaccgcatcgtgcctttcaatacaaagcttcaggcactggtaaaggaactggccaacgtggaatacattgactgctatacaccctttgtaaaggaaggaatggctaatcccgcttacttctcaggtaactacctctatggtaaaggttatgccaaactctctcaattattggcaaagaccatgggagcgggcataattcccacaagtgacgaagaagccaatttaaattatgcggtttttaaccaacgcacagaactgggtgatatcatttctcgtgcagaaggcttaaaactgggtaacgaggtcggtgcttacacgcccgaggctgctgcagacctgttgaaggctcttccctctgcctatatgttattaagtaaacaggatgcaaccggtgctgaactggctgccatgagcaaagaactcaatgcgttgatgaccaccctgttgccaaaactcaacttgccaaaagcttcgacggctgataacgaaacgtggtaccaactttacacacccaaccgcgagaatcgctaccttacctcgaacggaacaggcaaagagctgacaggtaacgataaacaggcttatgcccgcatgatgtggaaatttgtcagccgcacagatggtacgtttgacatcatcaaccgcgaagacagcggttatgtaagccctacagccaactttaatgctgccgtttctacatcagctacggctcctgcacaaggttgggaattaagttacagcaacaccgcgggactcttcatcatccgcagcggtaaagtgcaacttaaccagacgcaaaagaatctgaattatgcactctataattggagttcggggcaggatggattggaccgtgaggatgccggttgtcaatttgcgattgtcaatgcgcctgcagtgattcccgaacctcatgcgaatcctgtagcagtactcgattcggtagtgctcgacggcacaatgccttatgcagttcccgctgatgtggcatctgaaattttcaagcacaagtctgtaaccgtagccatcgacttcactccaaaagtagctcccgctcaacctgctatgctctttgcttcgtcaaacagtaaagggcaggattactttggcgtagtgacgcgcgaaacaaacaaatacggtttacaatatgtcggcaacagccacaaggaaggctggtatacgtggggcggaaaagacctgacgaagcgtagtcagattgtcatcacaatgaatggtgaaacggaaacctaccattactattttaatggaaaagccgatcgtagtgtttcgggaatgggagaatatggataccgtacatttggcaatgtgccgaatgttgacggattgtatctgggcggtgtagtccgtcaggataaaatcaatgaatatccatttgcaggaactattcattctgttcgcatatgggaccgtgtactcacagcagatgaagtagcatctttgacttatggcaaagaagatatgccagaagggacttaccagatagacatggctcacggtaagtttgtcaagagtaaccagaatggtacctggcaccaaatatggcagagcgacgttaccaatcctgtgttacaacttgatgcaagccataataatatgacaaaggatgaccaaggtaatatccttgcttacgtaggtctgtattctcccgaaaactatgcgctgattgtcccggtgggctatgcagtaacaggattttctttcgatgtcattaataacgaacacaatgatgccattgaagtagcttgcggaacaacgaagctgacaaccagcaataaggtgcaacactttgcagttagcggactcaaagagcagacggctacgtttaccctcaaaggggtcaacaagggcttgaaactgacaaatttccatgtgactgttgctaaaggcgaatatatagtggaagagcagtttgaagtattccctacgctcaacagcgctgcaattccctaccgtattcccggtatcgctactgcaaaaaacggtgatgtgattgccgtagcggactatcgtcattcacgcagcgacatcggctttgccggcagtgccaatgggcgcattgaccttcatgcccgtgtaagccacgacaacggtaaaacatgggatgatatcacgaccatcgttgagggacagggcaagaatgcaaccgatcctttctacacaggattcggtgacccctgtatcgttgctgatcgtgaaaccaatgacgtgctcgtgctgagctgttccggtgacatttctttcccgagcggtacacgcgaacatcaccagggtattgctcgctttatcagcaccgacttcggcaagacgtggtcagcacctaccaacctggcagaaagcatctattcacagtttgacaattctaagcgcggtccgattcgttccatgtttataggttcgggtaagattcaccaaagccgctatacaaaggtaggaagccattaccgtctctactgtgccgctttggtgcgtgatgtcaatgccacaatgtgtaattatgtgctttactccgacgacttcggtgcaaactggaaggtgttaggtggcactgatatcgctcctattccttcgggggcagatgaacctaaggctgaagaattgcccgacggcagtgtagttatcagcagccgttgcaatggcggccgttattataatatatacagctttaccagtgcgaagaaggcagaaggtagctggggtacggtggctttctccggcaagaacaataacggagtgacggcagagggaaattcctgcaatggtgaaattatgattcttcctgttacgcgccgtgcggacaacaaacccctttatctcgctttgcagtcgcttcccttcggcagcggccgtgccaatgtaggtgtctattataaggaactcgcttcatacgaagatttctgctctgcagactctttggctgccaactgggaaggtcgtcaccaggcttcgcgtatgagttctgcttactcaacgatgacgcttcaagctgattctacaattggtttcgtgtatgaagaagatacacatcgcactaatggtggtggctataccattgtttataaaaactatagtttggaacaccttaccgatagtctttacagtgtacgtgcggaagaagggtatgccgattggattaaggcttgtggcgaacgcaaggtggaaatcatcagcgaacagcaaacgggcgactttgtaggtatgtatgaccgtcagcaactttcgctgctcaaagaaaccggtgctcagtgtgtgaccgacccttcacctgaaacgtatgaacagattcagcaagtagcctcaagtcatcgcattgcattagagaacggggcagtctacatgcttcaaaataagttgtacccctctaaaaaactggccttgaacgagaatctgacggagtatgtcggcaaggaaggccgggacgactatatggagtttgtctttactcaagatgaagcaggtaactggaaagtgtacaatgaaaagtacaacaagtggctgggtgtaacgggacaaacggaagaacgtgtacctgctacgaccaaggctgatgctgcaacatacgaggtaacttcttcggcaacaggctttagcgtactgagttgtacgaagccgggtaatggcggcattccggccattcatctggcagctcacggacatatagtgccctggacatcaagtgctgatgcttcgatgtggcaaatctgcaaggtgggcatgagtacagatttggactcagtgcttactccggctcctgctgctcagccgacccgcatctatgatttgcagggtcgtctggtgaagaagccagtacttggaggtgtctatatcgtcaacggacgaaagaaattagtgaaataacatttaatcggacggactaactaactcgctcgctcttgtaaaaatacccctgcttcacactgtgacaggggtaatttttttctgtccgtttggatattcgcctaactacatttcttccatcgtaaaacattccattaaaatatcatacttatgaaggaccttgtttcgtaaggtttctaccttggtagcaaaatcctccggcttgaagttcttccgctgtcgtttaacctctgctactaatgctttccggccttcggcgtagatgccgacaatatcaatttcgcaagcatcttttccttttttagcctgccaccaagaacctatatccacaaaattttggctttccatcatcttctgacgaaaatactgctccaatgtaatcccggaataggttggatagtcattcttgataagctgccccagttgctcgaagttctccatctcgacaagccggtgatacttgatgaaatagcggaaccaaaagcgcaggaacaggtcggagatttcaaaccggaccgtctgcgagccttccttggccaggatgggacgtttcttgacaatgagctcgtaatcttcttcgagttttttgagatgaccggcaatgaccgtatctcccatgttctgctcgatttctgcggtcgtattccgaccgttggcgatgtccgacagtatggcaaaataattaccgtacttctttccgaactcctgaatgagcaatgccttgccctcattcaggaacggggaatctgattgcacgatgtaatccaccatgctttccatatccgtgcaacccttctgcatgaagagatcgatgtatttgggcactcctccggtgaaagtgtaaagcgccagaagatcttcattcgtatagtcaggcttgtggtcatgaagaatctccttcagtacggaagtagagaacggacgcagcttgatgatgctgtcacaccgtccgtaaagcggttcgcgggcatccataaaaatctggttcatcagcgtatagaccgaaccgctggccacaaagttgacgaacgtgctgtctttgtatcggtcccagatatcctgcattttgctgtaaacagccagattgatatagaagaattcctgaaattcatcaatgatcagattgtacttttccgtttttccggctcgcatcagcatctcgaatacatctgaaaaggaatcgatggattcaggaatgaagacattggatagtactgaattgatgtgttgcgcaaatccacggcaaagcatggattcattgctccggctcacaaaaagatagaccgtcggactctcttcacagcttttcaggataagcttcgtctttccgatacggcgacgaccggtcagtacggtcatctgtgaatgctgggcgaaggctatctgacgagtcttctccagtaaggccagttccttttcgcgattgtaaaatttcatacgcttctaatatatttttcttttacttgtacttgcagaaaaaaaacttaccgttataatacttacggctataagttttatacaaaggtaaacatttactattaaaagccaagagccagaggcttattcttttctttttcaatgtaaaaataggatttgctacctgaggaatgtgttttgaatagtatagaagcaaacagacctgaacagtgtaatcgcactgttcgggtcaatatataacctttatctattatgaatgcttatggatgtacagggcggatgcagtaaccgttgtccgttaatttcggattatcttgagaactgaaatagaatactttaagcatcggaaagtctccatactcaacattattcatcttggaatttgtaagataatatccgaaatcagtccgtttacacacatttccagctttatggtcctatagtaggaagaaaagtacctatttacaaacgtgtaccataaattcatatccaactatgtcaataactgcaaaccgcatcttacaaaatggggggggtaccacttaaatatttgtaatattttccatatttaaagtattcactagatttcatgataagatacttgctaacttcgcatgtacgcagaaaacagtttctaaatcacaatccatccatacaaataagtttacatctttgctgatgctgatttccagtttatgagaaaagtactggcacaaaccgatgttgctttcgctttagaactgaatcaaaattatggtttttaatttttaatctctatgaataaatttacttatttgttgttattccttttctgcatgatgggagtaatgaatgcgcaggagttagaaatttccggcttcaccaaagctgccgaaaacaggaccttacctgcagagttgactactggttattatttgattaaagaggtgaaccccaatgcttcgggtaaacctggtggttacttgaagtctgccagcgaagcagctaatgcagtaattacaccacaaggtaaaaacaccgcctacgatggcagcaatgctttggaattgtggtatgttgaaatgggacaagataaccaaactttcactatttctacagccaataaaaaagctgcctggcaggctccttaccaaggccaaaagaacctcgtagtttatgcgaacaaagccaatttgaccaagactactgaatccgttatacttggtaataagacggcaaaagctgctgatggttcgtgcatcattcagaacgataataagacggcttgtgttcactattcttctaatgcattaggttcatggccagatgcaaacccggcatcagttatgatgtttgagttctacaaagtggaagaagcagatctcatcaaagctgttaaagttacctatacttaccaattggaaggaacttcaaccactattgtaaaagaagttgcacaagctgttggcagtaactacaatgctccggttcttgatttcataacctttactcaaccggtaggcacagtaacaggcggtgaaaatgtaacggttaattgtaccgaaaacctgccttttgaaaaaactacagacttgaaaaatccgaaatggtttgcaattgatatgcacagtaatcagaatcgttacatgtgtcactatgaggcggataatcaaaacatatcagtagccgttcctggggatttagtcagcatatcaaaggatgatgcttacttttggtgtctcaccggtaacgtatttgatggttttcaaatctacaataagaaagccggaactaataaatcacttaataccaccacagataaacctcagattaccgaaggcgaaaaacatactatttggcatattgtaaagcctcagtcttccatttcaaatgcagcctgcttcaaggcagataatactcaatttttaaaccatcaaggtgataatacgctgggatactggtcagatgcggacgaaggttcatcttgtcgcttctttaagccagcggccattgccatggaacaggccgaattatatgccaatatgcctgaaaatgcaataggtgcttacaccggagttgagcaattagatccggctattactgaagctgaaaaagacttattcaattttgggaatgccaacaaattagtagatgcaatcaaagcactaaagccgaacggtgtgaccctcaaggcaggtaagtattatcgcttgcagaataaatactaccagtctcgttatgccaatgctgatatgaccggtaaggaaaatatgcaaaaggcaatcagttcggttgtattgttcgaagctaccgaaactgagaaccagtatcacttaaaaatgcaaggtcaaggtttgggtcatgtgactaagagtaatcaaatacgattgactactgataaaaataatatggggtcgttccaagttattgataagggtaatgccctgtatgcactcaaggacgttacaagtaccgaaaagaacttttgctacattcacgacgcttcttctcaaagtcataatttggtgggatggggagaatctgctgatgcttctcagtggtacattgttgaagctaccgatgtggaagttaccctcaacactgccgataatgcttcatacgctaccacttatcttccctttgcagtttctaacgttgagggtgcaactgcttacatcggtcagaaacaaggcgaaagcactttgcgcgctacggctattgaagccggtattcctgctaacacgggtgttatcctgaagggtgctgccaacgaagctaaggctgttctgacactcggtgaagccacttctaatgttcaaaacaatgcactcactggtaccctcgttgaaaaagattatgctaccagcgaattggtattcggtaaatcagcggaaggtactgtaggtttctacagcatggccgaaggctcaaagattggtgccaacaaggcatacttggctactgctgctactcaggcaatgaaacttgtgtttgacggtggcgtaacaggtattgaaaacgtaatggtcgaagctgctcatgctaacgctcctatctatgacctgaccggtcgccgcgtaatgaaggctgtgaaaggtggtttgtacatccaaagcggcaagaagttcatcgctcagtaatcaacactccttcaacatataaccacaacaaaacgaaacaacaatgaagaaatatatcaaaccttcaatcgaaataattacgctccaaaccgaagatgctatccttaccggtagcggcgataaaactatggatttcaccatcaatgccggtgaacaaaccgaaagtgcctggtcacaagacaaaggctggagcagtgatagctggtcttctactggcaaagccgagtaattcagtttcataagtagttgattaactgagtggcgggtgtccaacagcggttgggcacccgtttttttggcttcttatcaagaaaaagtgtatattcgcaatatataataatgtgaatatgtgaattttgaattgaaaggtatgcgattgactgctcaagggaaagacagtatgcatacctttatatatgttgccacaattttggacgatatggaaaaacggcttatatatgaggaactgttggatgaatacaacagacttcttgcagagaataggcttcttcatgaggaaatggacaagttgaaggctttgctgaacgacaggaacagcgtgacggcaccgcctatcgtgaaaagttatctgtctctggaagaaaaagtggatgtgttccgcaatctgttcaaggggcgtgaggacgtgtttgcgcggagatggtacagccggaccaccgggaaatccggctaccagcctgtatgccggaacgaatgggacaggcagttgtgcgacaagaaaagatacagatgtacggaatgccccaataggctgttcaaagcattggagtatgaggatatatacaggcatcttgaggggaaaagtccggacggacaggatgtaatcggtgcctatgccattcttgcagaccatacctgtaattttctttgtgcggattttgatgacaaatcctgtgaacacggctatcatcaggatgtactggcatacgtcggggtctgcaaggactggaatattccctgtgcaatagaacgctcacgttccggcaacggtgcacatgtctggatattctttgaacagctgttgtctgcatccaaagcacggaggcttggaaacacgatcctgacggaagccacgaacagaaacgggcggatgaccttcaaatcctacgaccgattctttccaaaccaggacaagctaccggaaggcggattcgggaatctggtggcactgccattgcaggggagagcccgcaaggaagggaacagtgtatttgtggatgaaaactttatggtttacaaagaccagtgggactatctgctccaaatgaaacggctttcagaagcggaaattgatgcgatactggcaaagcatgcaacggcttccgaactcggcgatttgtccacaacctgcgaaacaaggccttgggaaactccgacaccccagaaaatcacccgaaatgactttccggccaatctccaccttgtgtgctccaacatgctgtatattcctttgtccggactccaggcaaaggttatcaaccatctgaaacggattgcatcgttcagaaatcccgagttctatgccagacaaggaatgcgcctgtccacttacaatatcccccgtatcatctcctgtgccgatatggaagaggattatgtcgccctgccacgaggatgtgaagatgaggtgtcagccctgttggacagcaaccgggtatcttaccgcgtggaagacaagaccaattccggagagcatataaccgtaaggtttaaaggcaaactccacaaagaacaggaagcagccatagcttgtctgacagcctacaacaacggggtgttgaatgccacaaccgcatttggaaagacagttactgccatcggtttgatagcaaagcggaaagtgaacacgctggtattagtacacaccaaggctctgctggaccaatggaaatcccgcttagaagaatttcttcaaatcgactttacagaagatgaactacccaaaaagcgtggccgtaaaaagaccttttctccattcggtactctggattcaaagggaaacacgttgcatggaaaaatagacatcgccctgatacagtcctgtctggaggagaacggggtgaagccctttgtccgaaactacggaatggtgattgtggatgaatgccaccatgtttcggctgtgaattttgaacgggtattgaagtatgccaatgcccgctacgtctatgggttgacggccacctccatccgtaaggacggccaccagcccattatcttcatgcaatgcgggccggtccgtttttcggctgatgccaaagtccagatggcatcccaaactttcgcacgcctgctcgtaccccgtttcacctcctacagggaactggcagatgaaaaatccacttatgcacggatggtgcagaaaatgtccgaagacgtgaacagaaacaggctcatcacggatgatgtatgcgaagccttgaaggagggacgaacacctatagtactgaccggtcttaccgctcatgtagagacattggcaaaagctttggctcctcattgcaaacatgtagttacccttgtcggttcggaaccggcaaaggaaaaactccgtagaatggaatatctgcagaatgtaaacccctcagagccacttgtcatcgtggcaaccggaaagtatgttggcgaaggattcgactatccccgtttagacaccctgtttctggctttgcccgtttcctggaaagggattgtcgctcaatatgccgggcgattgcaccgggaatatacaggtaagaaggaagtccgcatctatgactatattgacatccgcatgccgatgtgcgatgtgatgtacagacgcaggctgaaaggatatgcatctgtaggttataggatcaagcaggagaaaccggtggatgtatctgctgaaagcctacaaggcattatttttaacggacacacctatcaaaagctgtttttcaatgatttatcccaagccaaacattcggtcgtcatttctgcaacgaggctatggctgagcaaacattcccccatacttgacatgctgaaggaattgtcggcacgaggtgtggaggttttcgctttggtcaaaaacaatacagaaaaggaagaaagactgaaagaaacaggaatccggaccaaagtcattgattcattgtcgatggacgctgttatcattgacaagtctttgatatggtatggaagcgtcaactatcttggttacaatacggatgaaaacaatgccatacgcattagtgattcaaaagtggctgatcaaattttggaagttctatatacataacatctgtcggtctttaatccaacttgtgcagaagaagtacatagaaatggaatatcgtttttcattaaacagctattggtgttatgttccctgcgcagcgtaccgtcaaactcgtagtacacgtcctttccatttttcattccttctttgtagaagcgttccttttccagtttctcctttgtgtaaaacgtgcggtgagcaccgtccagtttgccggatttctaggatttctctttcgttaccctaccttcaacgtcatactttctgcaggttctgtccttccaccctccttataggagcttttggctttcaacttgttgtagatgtactcttcataatcgccattgaaaagaccgcccttgaaacgggcaaggatataggaggaatggtagccgtcgataatgcggtgctctccgtaagaggcttgtcgtccgaaatttcccggtggagaatacggccgtcttccaggtttatgcctgtaataccatctatcggctactctttctgtgcatgaaacagcaaaacacatagtgcggctaccaacagcagaaaataacagttcattcgtttcatacttttgttgtttttagatttgtttttagtctttgattctcactctttctttaaggtacatacccttcgaacaggatgctgtgcaatcgcaaatttacacaaaggaacaaaaaaacaacagagtgggctgtttttatgctataatagttttcgaaagggagttgtcacagcctttatggaagaaaggaattagataatagcactaccaggaaagcaaggaatggtactacatcaacaaggaggggaaaagaataaaacctgaataaggactcaaccttacccacattaagatagattactttcctatcagaaccaaaagaatcagatgcaccggatagaaagcataaaacccatacttcgccaccttgccatggatgaacccgcgtgttccagcataacaagcaatcaccccgcaagccagcaaagcgccgactatcccatagtgcatcatcagcggaaaggtacagaatagttgcgcctttctaccggagggaaaagaaggattgctgacgttcccgaacaggtagaacaccaccatcatcagaatccctcgccactcatagtccacaccggaccaagtggcgaaaccagctatagaaaggatgacagccccacaaaggatgccatccttttttaatgcttccatcgcagccaaagccaaaacacccaatgccagggtgaagagtacattgtgcgtcccgtccgcgccattcagtaggtaccagggcacttcactgataactgcaaatccaagcagctgcaggaagtacttcatccggtttcgggtatgccggaagccttctgctatgaggaaggcgaacaccggaaaggcaatgcgaccgaagcagcgcatgacctcataaagaagtgtgccgtgttccattaagtagtaggcacagtggtctgtcaccattgaaacaagggcgatgaccttcagtgcactaccactcaatgaaggtaataagattgaatgttcagatgcagattgtaaggatgccatatacaaatcatttacgccatacccagcagttccttgaccattttctccacttcatcgttcacccgtttgaagttgcggttcagcatgatttccttctcgcggtcgttcttgaactcatagattttcggcagcggtacatagtggtcctcttcgtccttaatcttcttcatatcgaagtgtgtcttgcagaagtacttcgtggtcttgaactcctccgactgctcaatgtcgaagtggttcagcatgctgtcgtccgtagccgtgaagtcacgggcagcctgacccgccagccaaccggtcgccatatccgctatcttggcggcaggcaccaggtagtccatcttctcggagatggtggtcgataccttgttgtcgttgatggagatggaccgggaagtctgcttcgccttgccgaacacatcattctgcgcccattccaaggtttccttgttacgggcagcacccatgaagatgttaccgcaggtcgtaataatcttctgcatgcccaccttgccgtagtccgcttccagctgcggcagttcctgaaagcccagggtcaccgccactttgttggagcgagccgtaccaatcaagcggtctatcttatggaagtagagtgtgggcaattcatccacaatgatgctcaccgggatatttcccttggaattgactcttgtaatgagtcggttcagcaccagtgcattcaacgaaccgatgacctgttccttctccgggtcgttggcaatcaccaaatagctcggatttgctttatcagaaatcttcaagtcgaagtcatctcccgtaaacacccagtaggcttccggagataccaatcgggcggcattcacacgaagggtacccaccataccttccaactggtcgttcgccttattctcgtaggcactcttgaagggcgccatgagggaagcaatcttgtcgtcctgcatgaggatgttgaatacctggtcgtaggacctgcctaagaaggaaagtacatgcggcatgtccgaatactccccggtgatggtgtccggctccacctccttgccgtcttcatcctcgtaccagcacctctctatcgttacctgcttacccgtccggtctaaatacgagaagccatttaaatccacaaacatccggtcttcatccgttgacacgtcgttgccgttctcatccacgaaatccagcactacatttccgtcctggtcaaccgcattgaaatcatcccagttccggatcacaatctcatacttgtgaaccttcccgtccgtattcttcgggtcatccactaaagaaacaaagcgtttcagcttcttgccttgcttgaagcccaccggatggaagttcacaaagaaatagataattgccgccaggaagttctctgccgagttggtgaagaacgcctcagaaccccctttcttctcaccgccacccttgttcagggaagccagcagggtagccgccgtttccgatgctgccgccaggtccggaatgtacttgcgctgaatcggattgatgcggtccgaatactctacatccgtaaagttgatggtacggaaatcacagttctgcggcagtctgccagcctttcggttcttgcaatactgatagaaaagcgtcttggcgagtgtcgggtatttgaagtcatataccatcatagagaaccccttggctgcatgctgacggatgaacggatcaatgataccgaaggacttacccgaacccggtgtacctagtacaatcgtcccacggaagggattgatgatgttgatccagcccttgtgcatcttctgcttccagtagtaaatcatcgggatgttcaccgaatagtcattggctaccagagtttctgattgctggaacgattcgttctcaaagttgaagcggtcttcacccaccttgtagttgtagtacttggcaatgccatccagcccctgatgcaccagcatggtacctaccaccgaacagagcgcataaaggatgcggttggccgggaagccaaaccagctcatgccgatattcataccgtgaaagataaagcacatcccgaccaatgtcaatcccgccagcaccggatagatgaccatcgtcttcacgttgaacttcagcgccttcttcgccttggttccgatacagaccacacagatacagatgagctctgccaccttgcagcccgacacgtagttgaacaccttgaagcgggccagtaggtccaggataaactgcgtgacacggttatccgccgtaatgggaagattcatcacaatctcgatgatgagaaaaatgtagatgcaactgcggaagtagttgtacatctgttgctgttcccgggtttcttcgaatgccataagccatcagattgagtgaatactaaaaaggaatctttacacccagtaagagtccgttgcgaaaggtatctccatgcaagaagttgacgttgttcttctggatcagcgaaaactcccaaccgttctgaaagacatagctgtattcaaagccggcttccacaccgaggaagaacttcttctgggtggcaccgaactgaggacccaatcggaagcggagcataccgttcttgtaacgtaccaggcgctgcttatagaccaatccgccatcccaatagtagcccttccagaatcggcaacaggtgggtttttgccaatggttccccacttcaccgtagatttccacggcattgccatagctcaacggatgctcgtaacctatcatcgcattcaaggtattcgggaacaggaaaccggcattcagcgtgagtttcttatcctgggcggatgccgaaagcacggcaaacgcacaacagatgatcattaaaatcttcttcatatcgggtaggttttagcggtaaatgtaatagtacggatagcatgaagaattcttcagaatgtccgaatcaaagccatcggcattgaggatgtcttcatattcaatggtgagcgtaatcacacggccactgatttggttctctgatatttccagacggagcaccttctcatcggggaaggtcaacttctcaatcaccagcacattgcggtaattcttcttgaacttcttgaccggattcaacgaataaaccggtgtcagttcaatggtctgcgagttggtggctttcgtttctttcttgtccgtcagcttcacgcgaagttcctcaatgtcgtaggcaatcttcgtcttgttctgtaaggaataatcaataaagaagtagtcgccgatggtatagatattgttgacgatggccttcatgccgtgggcattcgacaccacctgattgtacttgcgcttgctgccatacaccgcccacgcatagcggaccatttcggccttgggcatcgacacctcggggttgatataggactgggtatcgctgtaggccacttcaaagatggaggctgccatgctgggataatgggtataaaccacgtcatactgagcgatatgccgctctccaatcagggtgatagtgcccaacaattcattctcgtcaaaggaggttttaatggagtctgactccagataaggcttgatgcgcaccatgttgtcggcgcactggttgcccataatcttggtcgtagagatgtccaccaatttgatgttttcgggcatgacgatgtgggtggtgatttcactgttcacgtagatcttctccttggcagcagcctgtacgaccataccgagaaggccgaagaaaagtaaaaataatttcgctttcatattaggtaatttttatgatttactgatttgattatttgttgattccgttacttgtaaacttgcttactctattacttgtaaccttacttactttgtgattagtaaggtagtttacctatttttattcttgacattttaccttgcttcctccgagttaatcaggtaaacaatcgtgttgtacttgattttcgccttgttcttacggatattggatgaaatagctgaagaagctgagttatagacgttttgcaaggcctgcagcgccaaggcttcaccggaaataccggaaccatagccatcttccgactggaagttgatgttctgctgcacggcactggagctggcatccttcacgaactcacggaaagaactttccggtacatagaacccttccatgccgtcattatcgaacactgaaagcttcacgttgatgaacttgtcaccgaccagaatgctggtaatggtagccttcacacgctgctgtccgaagcctgtcactgtaccatagaggtaggtgcctttcttcaacttggtgttggtgacggttatatcgtccagcaatttgaaacgaagtctggtaccttccttggctttggtggtctggtcaatcatggcacggatcaacttggcttcagctacatcatcgggtgaagttaccgtatggaacttctccgcattggtatcaccggacttaataacgagtttggggcgattgcgttctttttcagcctgacggaccttggcgatggagtctgctctttgtttctgagtcagttcatcccggtcaaagcgaccgatacctaatccgctttcaatggccttctgccgttcgtaacttctgcgttggatttcctccaggtctttagcgaattcatcctgtgaggtgtagccatcggtaggtgttgatgaagcggttctgcttccattgtttgacctatttcctgaaggagcattatccccgtaggcaaaggagttgatgtgtcttctggattcagccaacgacctttccagttcctccatttcccgttgttgacgaagccgttccgcttccgcagcatccagtttgttgagttcgtcttcgctgtagccatgctccagttcctcggctttcttctgttcttctccgatggcaccaacggcggtaaaggcatcctcgtccccgaaacggcgcgacatctcatacatcttgtctccggcttcctccgcattggcttgcggcagttccgtgttgatgcggtcggtggcaaccgtctgttgggcatcttctccgcccccgaacgtctgcatcacgaagtacaccagggcacacaggggaatgaacaccaccagcgggaagatgtacttgggctgtttgaaattgatttttctgatcatggatggtcattgttttgaagtgatttgacgatggattccagccggttgtaactttgtacgatatggatggaatcctgatggcttttacgtggtatcgcaatgagtgagtccagttcctcccgcagctgttgtccctcttgggtcaactccgttaacgtggaacggtgtatgctcttgttcgcctgaatggtgcggaacccagcaaacacgggttccaactgggcaatactgctgacatccggctcacgattattttgctgtccaatactatctattaaaacggtacttgccagcagaaaaaacagcgaaccggtgacataggcaaaggtgcgtctgggatgcttccttgcccagatgttggccagacggatgcgtcctgccaggcggtatttggtgccgacggatcccaacttgggttgcagccaggagcgtatcaaatgatgcgtcttgagcctgctttcctgaagtgtctttctgaatgatttcatggggtacttattctctaaatgttagtaatctaaatctttattctccagtgtcctccagttcgtaatcatcagtccatggggattgtttcttgttctgggaacagattcgatgaaccccgttgtgaccatggagcgtttcaaatcccgggtacggcgcttgatgagctgcgttccatagtaggtaaacttccgttcgtgttcatcgaactgaatagagtcacacatgatggtacacaccgccgaagaggagatgatgtcggaatagaatccgttctcatccaacgcctgcttctgtttgagggccgtaccgtctgccatgtacatcgccttgccgaccgtccacttgatgtagtcgttatctggaggcaggttaaagaaatactgatggaagagctggatatgcgccttggcttccatcgtgaagttcgcttccagctgggcacgctgtgccaggaagggaatgtcaccgtccagtatgtaaatctgctcccgttcttttgtcacgagcgagatgcagcaccagacggtgaacccgcagatgagggtgcagccacctatcgtggccagcaccgtcatcagggcgagtttcgttttctgtgctaaggattctataagcatagggaatggtttgagtgattacttcttgttattgctgttcttggatttgcccggtctgaccagagaagcggcaccgctggctgcagagccgaccacacttcctgccacacctcctgccatcgctgccatgcccatcacggtactgccggctgctgaacctgcaccggagctgacaccgcccggaatcagccaggaagccacttcgggcacaaagcggatgatataggcacccaccagcatccccatggcatacatacagttggaaccgatgccctgcagtcccagtgcgccgatctgttcccaggagtttaccgaaccgtgaagcaggtggttgtaagctatgaggtcctgctgcaggttatagagcaggatgaagtcgatgtagtagatgcacatataggtgacgaagccccacaacgagagggaaaggaacttcgacatccactggctccaggccgaattccagggcggtgccagggacagggcgaacatgatgggacagaaaatcatcatgatggccatgaagatgcgctgcgccaccagaatgccgtagtaggacatctggaatatcagttcccccacaaagcgtatgacatcgttgatccattcgctcatcttggtttcagccgccaccgctgcccgctgggcatagttgttgatggtgttgcccagattctccacgttgtagatgagcttgtcccaccaggcagcatcctgtccgatggcggctacctgctgggcggtggaaatggagtcctgcacctcccgcaggcggtcgaggtattcactctgtttctgcgccaccttcaactcgaaagcggccacctccttgttcttggcttttgccatggccttggtagcggtttccagtcctttgccgggaacctgcagggcctgacagatccacgaggaagaagagatacagatggaaatgccgatgatgcgcaggagtttcatcacgtccatgccgcgccgtccgagcatcatcatccagcactcgtaggagcctacacagagtgccagcagcaagccgatgatgcgtgccagtccgacggcatcacccagcaccgccacattgggaaaggtttccatggcgaccagcagcttatccagactctcgtcaatggcaggcaatccgatggttaatggtactaacagtagattcatatttcattctatttttgttacaaactattttctcaaagaatctcattcctaaacttgtatgtcaataatgcgtggaagccaccgcacagaggttggcggtccgtttgaccagttcctccattttttgtcgggcttcctcgtaagccttctgccgcttggcattctccagtccgtaaccgactcccatcttgtggatgtaggcgatgtcggcacagagaatttcattctgacggctcagttcgtccacctgatactggagcttgcccttgcttttctgcatgcagtagagcagtccgtcggtgatgcagtcctgcatccggttgaactcgtccttgtaggaaggaaacatcagatccacgttgcggtctgcctcgcggagcagttcctcctgatagagttcctccatcttctgccgctcttcctccaccttcttgattttctgccgctgggtctcttccgccgtcacccgggtgggcatgatgcgtttcacattggacttatgctccttgaagcgcacccggaagccggattggaatcctgcccacttccagtacatttccgcgcccgagtatttcttgtgcagcaggaagtagtaccagtccggtgcaaaatcccaagggccgttctccatggagcgccactgccgctgtttctccttatcgttggcctttcgctgggcatgcagaccggaagccatcgtcatgcccagcaagcagagtaataaaattctataccgcatatcctttgttccattgattgatgacacgatttgctatctcgtccttcacgttggagttgagtatttcccagatgtagtcgggcttccagccgcagtcggtgatgagaaagcagtagaggttcgcattgtccacgatgtagcgggccttgtcgatggtggctttgagcgtcatcaccaggttcagcttctcgtccatggaagccttcatcaggttgatgccggaagcggccacggaagcgtagagcttgtagcagtgctgcacttcccgggctatcgccacgttggcatcggcataataccatcccacaaagggcttcttcttgacatgcttgaaagtgttggaagtaaagtccttgtattcctttaccagcatgtagagcgagttggcggtggaggaaatggctcccgccaataccaaataggaatgggcattgctcatcttggtgttcagcgtggtccgcacctcgttgaacttgttggcgcctttcgtcaccagcgactgttccccgaaactggtggccactctgcccagtgcctggtcttcgtccttcttgatgcacttgtgcagggctatcagcgcttcaatggtgggcaggtccttggggatgaccacggcatagcttacgtttgacgacatgacagatagcatcaaacagactgcgcccaatttctttttccagtgtttcatagctttttcatcttttaattagcagccaccagtccgttccagtccgataccagtccatccacatggtttttcatggtgacaatgttggcccatccctcggggtcgatggcaaagcagaggtcattcaaggtggcatactgtgccatgagcatcatgccgtccaccttgtagcggatctcattcaggtgggtgtagatggagttggccagcgacatccgttcgtagcggtcgagcatgttgtagccgtcgctcttcttctcggcagtgccttctcccttgagcggattgggaatcctcgcattgttcacgatgtttacgaagttgcccaccagctgctgtgtttccatcaccagcccgcccaattccgtcaggcagtagagctggttggtgaacttcgccttgctgaccgttttaatcagttccggtacattccggatgatatcgaaggcacagctgccgatttccttgtagtacaggctctccgtaccgaaaccggagatgttctgcattgacagcttgtagagttccttcatcgtggccatgctgaccgaatagagttccaccttctgctgcttggcggcgatggtgtccagtcgggcattgtgctgttcctcgatgagtttctgggcggcaaggttggacgatacgattttgatgcagttcttgtccacaactacacgccaacctgcaaatgattgaacagctgctgtaagaaacaacatgactaaaaaagcaaatcttaacttgaccataatgacatgactttttgatgttgattgacttttctggcaaattccaggtacttatgcccgccgtcctgtttgcggtctgcctctatatgcgtaatggcttcctgcatggttccgtagtgggccagatagagtttgagggcttccttttccgtgcgttcggtggtataagcccagtagcattccggtgcttcttccacaccgtacacatccgagttttgtccccggcatatccagacttccttgaagtagctgcgtccttcccggttgttcagggcattgatggtgaatatctgctgccgctggatgggtgtcagtcccaggatggcggcaatgtcctcgtagcggtccttgaacttggtctggtcgagcagtatcttcacatcggaattgttgatgatggcttcctttacaatgggtgaatctatcacatcattcaactcctgggtaacgacacctgctataccatggaactttctgactgttttgtacaaatatttgatgtattccgccatggtgggcgaagcaatcgccttccacgcttcctcgatgatgagtgccttgcgtcctttcttgatgcgcatcttttgcaggaacacgtccatgatgatgagtaccacaatcggaaacagcacggggtcatccttaatcttgtcgatttcgaagacaatgaactgctcatcgaagaggtttacgtccaaatcggagttcagggtcatctccagttcgccaccccggtagaactgcttcaggatggcagcgaaatctcggatgttgaactgaatcttctcctgtgccacgatttgcggaatgcgctccagtgcaaactcatagtaggagttgaaggacagttcccggactttcagtctgcgtttctgttcctcgatgtggtctatctgcttgtctatcttgataagcatggagttgttgtagagttccttcttgtagttctcgattatctgcagggcacgttccttttcgcctttactggcagcttcatcctgggcaagggcaaaaagcgaacggcactggcggagcagcttgagtcgccgggcttctgcaggaagcatgagtgccctgctttctgcctgcttgtccatttcggcttctctgatttgagcatcaatgtcttccatgctatgggagaacttgtcgtagtcttcttccatcttggaggcaaccaacagcttttgtctcaacccttcacgttccttctccgtgaacttggtaaagggatggaagtaggcttcatagtattccacgatggtctggttaatgagcatgtcctcaatcttacttggaaagtcgttacctttgaatatcaagaatatcaaagacttcaagaagttcttcttctccccgaagttcaagtcatactcttcttttgttaccttgaaaggattcatggagatgggcttctccttcgagtaagaaatataggttcccttgtagtaaccacagataccttcataggaatcacccgtatcgaccataaccacatccgtcttttgctctaatagttgacgaaccacgctgttcatgtggaatgacttcccgcttcctgaaggtccgatgcagaagaagttggcattatccgtcatcttcaccttaccctctttccctgtgatgtcaatacacaccggcagcccctggcggtcggtgtagtaagtggtcagcggagtatcttccgagccctttagatgttccttgaaaaagaagcacagagcggcatcggagagcgtcaaaaagaggtcgtagtccggattgaaggcatagccgttgccggggaagctgtcggtaaacaattccaactggttgtaggcggtacgggacggcatgatgccgcattcatacagcttggtttccagataggaagtgaccggagtgaccttgtctgccgggcagcttaccaggatgttgaagttgcaatagaccagctgcgtgctgtccaccgccaggcggtccagcacttcctcaatgtcttccttcgcaatcttgttgctcgggtcaggcatggagccgtggcgcttggctttggcctggagttttctcagcaattttcgttggttcggtatctgtaccacctggttgaacaccacacaatcagcatggggcacactcgtcagaaaagagaacaagtccgtagcgatgccgtagccgttgatgttcatctgagtatagggcttcaccagcgaaggcaggttaatctcgtctatatccaccagcggataagaacggactacccggtcgccgattttcagatactcgtctgatgccttgaagttggtcatcgagaacggaccatgccggaactggaaggccatgaagcggtggcaatactcgttcacctcttccttggtcaacttccggtgcttgatgttcttctccttgaggatgtcgttcaccttggaaaccttggaatggaagtccagccatttctttgggtcgtactgcacgaactggctgcgctgtgcctcctgcgtaatgataaggtaggtacgtatttccgtaaattctcttccctcaaagtaacggaaatagcttttggtcaggaactccgcatcctccggcacctcatggtggtaggactgcttgcagagcacgtcctgtttctgcagggcatagccctcgccaagggtctgcaccacgttggagagcacatcctgaaagagcatgtactgctccgcatcggtgcagagctgctgcacgggattggttatctcgaaaataaccgacggttcccccttggctgaaaaaaggacgacattgccgtccgtttcttccagctgtgcatagaggccgtcaaatattcttttcttggtacgtgccatagtctttgaaatagttttacgagttgcgtctcagattcttgtaaacatagataccctttgcccgccgtttgttgtggagaccgccacgctgcttgacgtaaatggtaaccaatccgaccactgccatcaccagcatggcgatgaacccggcaagctttcccaaagcgatggagaagccgatgaagcctacgaacgacacaccgatggccgctgctgccagtgtcagaaaacggccgcgtatgcccatgaactccagcggtttctgcaagcctttgaaaacgggataaccctcctgattcatcgtcataattctggatagtatgttgacaagtaagattacttaaagaagagcggaagcgcttcagaaagagcgataaatgcaatacagccaccaatcgtcagcatgatagttttcttgacatcctggtcgccgttttgtaggcttggttcagagcgccttacggcattactgccgcaggtctctccaaacctgcccccgaaccgtacgtacatgtctccatgtatacggctctccgttattgaatgcactttatttctcatgttctttctcttttatcttggtatagcaactttcgcatactgcgatagttttacggtgtgaacccaacattatcttaccccattccgtcttgtcattgatagatttcaaagtgcgaacatggtgcatgatgagcttatcgtgtctgccgcacaactcacagatttcacttcttaatcgttccgctaatgaacgtttcgggaagctaacgtgaggcaagttgtcacaatcagccattttgttaggttgtttttgcgcaaatccaccattgtataggacacggtatttttgatttccctttttatcggtgtattcaatcttaaattccttgtcctttctgtacttccttacaatcttcggcatagtactgttaagtttctgtgccaatgtcttgtagagactgtactgcatgatgtaaccaagttttgagcaggttgcagatacattgtcagctatacagtaatagttgtagaatcctcttatctcaaggttgaattttgcaaggattcggtggctttccatacctatcaagtagcttcttgactgtggtagccataccgttttaccgttttgttctgtgaatttcacagcaccgtagctcatcagcttgtcttttaccgtttccgatgaaagcaacaattgaactttacctctgaatgctcgtgaaaggattcctttacagtttcttttcatcacatccagggtttttacggttatccgatagccaaggaacttggcttcttcccttgcatgggtaattagcgtcttttctgctgaaagttcgagtttgagtctatcacgcatgtagttggtaatatcctctttgattctctcacattcttgctttgaaccaatcacaccgataagaaaatcgtcagcataccttacatatttgagacggcgataattttcatccatctcatctcttacgggcatactccgcaactgtttctgaagttgcttgatttctgcatcaagagcggctgcttcgacagggtcttcagtagcctttcttttctttcgcctgtttacagtacgcatgttcagattcatgtattcgtttcgtatcttcctgctttctcctttatcaaagagggtggcatattctttcatgtacttgtcgaactggtcaaggtagatattagccaatatgggactgactatccctccttggggtgtgcccgaataagttttgttaaaataccactcttccagataaccagcccttaggaacttccatatcaagcgaatgaaacgctcatcagctattcgcatccgcagaatatctatcagtgttgcatggtggatattatcgaaaaagcctttgatgtctccttctataaaccaccgcataccggtaaatgtctttttgatgcttatgagggctgtgtggcaacttttgaatggtctgaatccatgtgaagtgctttcaaaatgaccttcataaatggcttcgagaatcattctagttacctcctgcaccaacttgtcttcgatagtagggattcccaaaggacgtttctttccattcttcttgggaatgtacactctcttggcaggttggggagaatagctctcatttttcaagctctcaatgagttttccaatgcggtcgatagtcattccgtcaatggtaagaccatctgtaccgggagtcatgttgccgggtttggatttaatccgttcgtaggcaagcatgaacatttcctcgttaaagagaatacggtagatacgctcatacttatagtctgaaactttactgtgtgagcttaaagtgttcaatattatctcgggatttctcatacgtctctcacgttatccgttaatactattgaaatcaataactgttccccttcgccatgtagaaggctttcccttcctcggactactatgggaactccgttgccgtaccgaatattcagaacctttgttcatagccagttggcatttcgggttaggcaatctccgtttagtttgcgtgataactgttggcacgactgactgtcggatgcgacttacacccttttctccgcttactgcggttacgttgcggcaagttcctgctgtaccaataaatgcaggttggcacagtaccgcaatatggcgtatgtaactgctttccgccatagtcacttcaaataccgttggattatcgttaaaccaatcaggcttcatcctcatgtcagtctttatcccttgcagctgcgtctcggctttgcagttcgccgacttgccacttttccagcctgctgttttccccttatagatttctccgcagggtatagctgatgggattaggatgttgtaaaacatacagttaatctttgttatctacatgttagtagaggttaattactaaaattggaccgtccattctacatggaacattatcctaacttcttgccaaagaagtatttatcacgcaaccattacggacgcacgcatcttgaaatagacgttaaaagctcctactaaaactataacagccgcaatcgccttcattaaatttgacaccggagtctggtaggaactcacttcctgcgtggctttggtaaaacctgcggctcccttgctgcctgccatcgcttcaccgaccgataccgtaagggcaaagatgaacatgaggcatttctgtaccacactgcaggccataaggcggttgactgctttttcagaagaacgctggatagagcggaagatgctttcgtttccgcatacgagttgattgaattgtttcattgtatatttctttaataatggatttcatcgccaaaggaacagaggtcgccaaagaaacagaggtcattcaagtatcagaggtcgctaaaggaacggtggactttcgtccaaatagtttcgggtgctttacccggcatatcgcatgctttcgcagtgatagataatggtacccaggtcacattcaccggtctcggccagccggtcgatggctttgaagatgtcatccaccagaataccgtctgtcaggatgggttcgcggtaggtcggtgataagttagattcggcagaagttccagcttccgacgggactgcttcggcatctgcattggaagtgtcttcaatttcatcttcatcagtagcatcagaagttgatgtggcatccgcattatccggctcagctgtttgagtctgtgatgctgtttcagatgaaggattctcagttgaagatgtttcttccgaaacgggaacatcttcaccacttttagaagaagcattctcattccctgcttcttccagcttcttttcctcttccttcttcttatcgtcccgggtcaccagctggggctggaaggaacaggcttcatccgtgatgtctatttcctcttcggattggttctcctgcgctgccgcctcggctgctttcagatgctggatgtccatgaatatcagaaagccgtagtagcctatcaataccacaaagaggattaagattacttgtccgtaggtcatagctgtagttataggaggtttgacaatacaatggtttcctctgacggataaggcagaaagcggaagcccagtttggatcctctcagctctgattcctgaatccggtgaaggtcatccgtataataaaggatgccgtattcctctccggcaatgtagcctttggacttgagccatgaacggagtcttacccgtgcccggttggacacaaccttgatgcgggtgatgggactcagcccaaagataaccctgcgtctttccctccgcattatatcagaatggattcgtgaaagcaccttaaaatcctccaacgcagtacgcttcaatcccattctaacagcaatgcgccgggcatattcccgtgaaattcccaattccttgcctatctcagcataagaccggtgagcaaaatgattgcgtacataatctgcatgctccatccaacggcttttgaccgctttcttcagccccaagctgcgggccttttcttttacagcacgttcgcacatgcccaaaacctctgcggttctcggggttgtttctatgggatagagctggataagaaccgcaatcttctgctctgtccaattagtccttttctttctcataatctttctgattgaaatttgtaaacaatgatttcttttctctacgaaacggcacaagctgtagaaggtaaatatcaaagaatgtacggactatggcattgaccatatccgaacggctgcggttatggatgttgcagtcatccagcgagtctgccagatcccggtccagcctgcataccagccgttcacttttgtcattacattcatcggagatttccaaatttttcaggaatcctctccaataatcttctacctcctttgagggagaaagatggataggttctccgtcagtttccgttttcttttcacttgtatcattcatccgatcctggaggccggatgatttttccaacatttcgggcaacttgtgcgtcaggataatgtcagaatcattgatgccttgtgtcaagtcaccaatttccggaatgtcttttttcatgcgctatgttatttgatggttactgataaatttaatctagtcattcatattccgttttttccttatcggttgtatcagcagacagacctcctgcttcgcattcttcttcatttccatcttcatccatggcaatctgtgtaacaccttcttcccgattttttttcttgcctattttcggattaagattatccgtcagttgtattccggtaagctttacctccctcactggagttaccttgccgaaaatgctgaaatagatcttgtcgaaaacattgccaacataacgaatctgcatatccagtgcagccactgtactgaaccgctccatatcagcccgcctcggtattttcccggttacataaccgtaattagaaaaagtttcccgtgtgttgtcccaaagtatcagttcagagcgcttgcctacccggttgtcattgaggttgggaatgatgaagagctgtgcattcatacggtctccaactacctgacgaagtctgtcaagaaaaagcaggaaactggctgtggaaggaacggtcaccagatcatagtggaaaggaacaacgatgatatctgaattgacaaacatggggaccagaccttccgctttcagacttcccggtgaatccataagcaccacatcaatctccggatcattatgcagcttttcaatcagggaggtcatggccgtcttgtcatccggctcataagcccatacttcgtaaggtacctgttcctctccatattttttaaggtctgtcttacggcacttcataatcgagtgctgaaaatcacagtcgattattaccagacggacacctttcgttaccaagtaattggcaaaagtcacacaaagagtagtctttccgactcctcctttctggttggcaaaggttactatgacgggggactgtatcatgtcgtttttcgcttgaattaaatttgcaagcaaaagtatgtgcagagatatagaaaacctaaatgcacaacatcaatgtgcttgagattgcagaaacatgggtaaataagtcggataaaccagagtttttcagtctatatgcccgaataggttgcagtaggcagtcccatgaaaggtgaatgtcggctttaccaagttgcccaactcgaattgctgagttgggcaactcagctctttgagttgggcgactcagcaaactgagttgggttgccttaggaagaaagcaacagaaagtttctaattcatgaagagaattacctgctttaccagtgcctccaaatacctattactttcattttagctatacagattcttatatcggctatcaatcttcatctaagaaaaacacacaaacaaaaagctcgcagccatgttggagtaatccaatccatagctacgagctaataaccttttcaaaccttatttttctattcttcgttatggcactgatggtgttgacattgatgcttgtgattatgttgatgatggtgttcatgtgaagcacaacttaccccggaatcagtaatcttaccattcagataatctgttgctacatcaagaatagcacccgaacaacctcttaccactttgatgttatgattagacaatacattgagcgcaccttgtcccatattgcctgccaacatcacactgacacccatatcctgcagttgcacggcaatatccgatttacatccacatccttgaggcgacggaattgtttcactgcttaatatctgattttcctggttcaccgtataaatagtataatactcacaatgaccgaaatgatcgtccaccttattatctctggtgggaactgcaattttcatcataatactttctttatttaaattgatacaacttgttctaatggtagccgaatgacacatcggacactcctgctcactaaacctccgtgccggatttatattattgaaaaagaatccacacttgtcacaacaaaaccattcgctgtctgtataggctacccctccttctatttgaagcggaataccctcaaccaatgcccgtaccatctttctccgtgcgctactgtaaatccgacttaaagtaggacgagagactcccatggattccgaagcttcctgctgtgtcttcatttcataatcacacaaaaaaattgcctcatattcctcgtagtacaaacgaacaacttctttgcacttatctatgccaataggcataaaacccgatgccaaaggtatattttttacttttcgaatatttctaggacgtggtgacattccaaaattttatttgtccactgcaaagataatgaacaaatgttcaaaaccgaaagaaaatatgttattttaatggaaagtattgaaatcacgttcttatttaccgtttaaatgaacgtccatcatccacatcattgtagtcggtcttttttccaacctcccattcgcggttggcgctgtgactgccttttccttctttccgaagtttacccagtccttgatgggatttctgctgcaaactcttgaccggattgagcgtcttcttcttggacttcttgaacggcacaccctggcgcttctgctttttggatttcttcttcacccgttccacatcgaaaccttcttcattcaggttgatgagaatatgttccttgaagttgatggcatagtaggtatcgtccacctgacggatgataaatccctcctggtagagggcactgcgcggtgacttcacttccgggtcattgaagatgtcatgcaactggctcacagcatctgcatacttggaactgcgctccgaaaaaatgtccaccagatccggccggtccaccttgaagaccttgcacagcatttccacttcagcttcgttcttcggatggaacttctcgatgaagctgatgcggttgttgcgatcaatggccttggccatgaaagggggcaagggtctgctcttgccatcgtagtagatgacacctttctttatataggcacgctgtttcttgagtttctggaagatttctccctgagtggtcttgggattgagggtcagcaactggtctatgaatgcttctatccggtcaaagcgttgttcgggagtagcaaagtccagcagttcttctacggcaaggactctgaccccatgaatgaccgtcttgttggcatggtctatcagcatatagccataggggttgtctttcttgccgaagaagaccacatccactccaaagttctccttcatttccttctgcaattcctctttgttggcacatacgtcccggtattttttcagataggctctcagctgtcggttgcgtgacttgtcctgataacctttcttgaacagggcttcaatctctgtcagggggagttttttttggattcgtccgccttgcttgacgaagacgttcccgtctttctggaagacttcatagcccatgattcctatcacggccttgaactgggcaaaggaggagaagctgtactgcttggcagcctcgatgtccttgtctgttttctgctgccggtccataccgagtatcttgtcaattaccgtctgtgagcgcctgcgttcatggtcgtgctgtatcttgcgaccgtcgggtgacactctcgaagtaacgatgtgcaggtgtgtgttgtctgtatcgtgatgggcataaatgagccagggttgtccgggttcggcataacccatttcctgcagataccgatgcgcgaaatcaagcaactgctgttccgacatttcatggcctttgcaggaaatggctacatggaactgcggtttctgaatccggctgttctgggaactgtagaactggagaaattgcaccagctgtttggcggtcggatgttccgaggcatccagtccaccgaagttctgcatctccagcagggtagccacttctttataaaccttgtgttcgttgtaaccgactgcatggaagtctgcgcttccgggaagtatggttgctatcataatttgtatatttgtttgctgattcatgaaacttggggttgcggaccagacagactaaaaatcccggtcgcttgtaaaactggatacaggttagtctattcatcacacccaaatacaaaatatccgtttacctttacttaatcagccgtgttctgttgttcaaagtttccaagtcatcctttatccttttcaagatgttctgtacatcctgaatcgaagggagcaagacttcattcacataaccgggtgacagcagtccggcaaccgccagttcgttgacccgtctgaccgactgattcaggttgctgccagcccaggacagttcgttctggaactttcggtaaaatacacacaagtcctgcatcatctcaatctgttgtttgacatccacatgggtaaattcttctacagctttgcggatataattgctcacggactggtagggaacagctttttccttcaggctcaacagttcgtccgctgtaagccgcaactgaaatactttggtacgctggttcttcatattccataactttagttgttcggattcccggacacctatttcgcaaagcgaaacagcgatgtacatcgctccgctgcacggcagtcggcaagttacccttgtgagaacaaaacttgttttgttctcacaagggtacaacttgcttggctccatatgcaacgcagttcgatgtcttccgggatgatttcagacccaaattaccgcaaaattttgcgaagcgcaaaaatgcacaacatctttctgagagaaaatcttctgttaaattcacctgtgtatcaagcattcttgtgacttgcattcaaaggtttcccaagttcctgttcattgactccttgttcatccatatatgttcacaaagcatgaagtaaaaaccgacggttgttcatgtggctatagaaacaaggcttgaagtttagctgtcggaggcatatcggtataaatggctgcatcattctgcgcttgtttgcttggtgttgcacagttttcataatgagtgaaacaagagatagaggaacaacaaatctgtaaacagaagaatgtgcaatcatattgccatgtgagcattagctgaaagacaataggacatatagctatggcatcagtctttattcaacctatgtttatttgcttctcatcccaatagccatgacaacaccaggaaaagagcattcagcaatgaaaatctgtaaacatgcgttctgtgatagaaggagaaaaagaacaatggtaccggctattatgaaactgaacccaaagggaaaagaagaataaggtgtaatcgtattgtagaacctacacattttggacattcaaaacttcgggcatatcagcatggtattcaaagttgcaggatgacaatgcttgacaagcacagagttcatggtcatcaaatacagaaaaagaggttgaaaaagcatgtataggtacgaataaaacgaagataaatccttgcgtatttcattgatttttagtatatttggtaatagcaatctacctcgtagagattatttacaactaaaaaacagatgaccatgtttgaactgttgctccttatatatatgtttccggtctgcattcttattggtttgctgatacggtttgcactttggcttattcgcgtaatgctgcggttggcattatggctggtaaagaaaactttcgtcttgatatggaagctggtgacgcttgcgtttgtgctggttatttccggcagtctgttccggcagcattcggacggataaaagtggcatgaggaaaggtataatatggaaaaagccgtatcttcctgttggaatgatacggcttggtaaaggtgtaacgggtcttttccctcgaagtaaggattggcagaagcaagtcggttaattaatgaaacagtttttgaagccatcaaacttgtcggcgacttgcatcatatcctgctcaattttcttgttggtgatacgcgcatagatttgtgttgttttaatgttggtatgtcccagcatcttcgaaacggactcaatgggaacacccttgctgagcaacatcgttgcaaacgtatgacgtgcaaggtggtagctgagacgtttcttgattccacaaaggtcagcaatctctttgagataagcattgatcttttgatttgacaggactggaagcagcctgttgtctttagtctttcctttatacttgtcaagaatcatttgaggtatctccaacaaagggatattactctgcacattggtcttctgacggttgatgataatccacggacggttatcaagggtgatgatattttcctgcgtcaggtgagccacgtcgatgtaggcaagcccacagaaacaggaaaagataaaaacgtccctcaccatttcaagccgaggtatctcaaaatctttctgcatgatgcgctgtatttcttcatccgtaagaaaaccccgatccaccggttccaggtgaaagtggtggttcaagaaagggtcgtgcgtcatcacaccgcacttctgagcaaagataactacggtcttgaagaatttgagcgtcttggtagccgaatttgacttcagggaaactacggtcttcagatatatttcaaaatcatggataatcagatgcgtcagttcacccggcatgagatcctttctgccgtatttggcatggaggaaattcacaaaatgacttcgggcagccgaatatttgtgatacaaggctatgcttttccctgcaccaacctgagccttgatgtcctccagatacttgtcatagaactccacaaacgtagtcttgaccttattcttgcccaaaaagatacttttgattttgtcaagggtcaggtcttcgtcaaattcatgcttcttgaaaatcatctgcagcgaatttgagatgttgtccagctgagcattcagattcaaggattcgcttccacgcccctttacccggttggtggaattgttccatagcttcttgtcaatgtagataccggaagaaccgacattcagcatttcaccattcaggaaaatccggatcatcaagggagactttccctgcttgttttcgtagtttgaacgtacatagtacgacactttaaaaatcattctcataacgactcaaatttaatgtagcaccatggctacaaagttctacataatcagttatgaatcaatgattttataggcttcaaaatgggcttcatttttcggtcactgctacatttttttgaggggtcttcaaagtgtagcagtaaatgtagcaaataatgaccgaactttgaaggctaaaccctacattcaggccttcaccttgttggggcgcaaaaataaaaaagcaccgtaatcagctgatatacggtgctttgaatgactttttgaaggcttttgtgaagtccttcgtttttgtttcagcggagagacagggattcgaaccccgggtgcctcgcagcacaacggttttcaagaccgccgcaatcgaccactctgccacctctccaaaacttctttttcagaagtgcttttcttttaaagcggtgcaaagatacaaatcattttttattctacaaacttttctgcacaaaaacagagcaattataccaaaattcttgtttatacccactacggaacgaacataacggcatttaggctatttgttaaaatttatcaatggcaagataatattttataacttactgaatatcagtatgcttacaaagagtcacattcagtatacgattgaaccctattcagtatacgactgaatggcattcactatacgactgaattaggttcagaatacgactgttcttaaacctacattatttgtaaataatgcagattattatccgattcttgtttctgttcgtaaaccacacataaagaaggtattagcatctctattcccccgaacattcactacctaataatagttattttatgctgttcaacataaaaaggggaatctctcttataaaattacggaatttattcagtatttttgtgcgctctaaaggataacattatctaacctactaacaaaaacaaattttatggaattgaacaaaacctttaccaatgggctttggagcaaagaaatcaatgtcagtgatttcgtcagtaaaaacatcgcaccctataccggagatgcatcttttctgcagggacctaccgaacgtaccaaacgtatctgggacatctgtctgaaagctctcgaagaagaaagaaacaacaatggcgtccgttcactggacaatagcaccgtatctaccattacttctcataaagccggatatattgataaggacaatgaactcattgtcggtttgcagaccgatgaactgttgaaacgttccatcaaacctttcggaggcatcaacgtggtagcaaaagcatgccgtgaaaacggagtggaagtggacgataaagtaaaagacatcttcacccattaccgcaaaacacataacgacggcgtattcgatgtatataccgaagaaatccgttccttccgctcattgggatttctgaccggtcttcccgacaactatgcccgcggacgtatcatcggtgactaccggcgtctggcactctacggcatcgaccgacttatcgaagccaagcaggaggacttgcgtaaccttacaggcccgatgaccgaagcacgtatccgcctgcgcgaagaagtggcagaacaaatcagagccttgaaagatatcaaagtaatgggtgaatattatgggcttgacctcagccacccggctacatctgcccaagaagccgtgcaatgggtatacatggcatatcttgctgccatcaaagagcaggacggtgctgccatgtcactgggtaacgtatcttctttcctcgatattttcatcgaatacgatttggctcatggaaagattgacgagacgtttgcgcaagaactgatagaccagttcgtcatcaagctgcgcatggtacgccatctgcgtatgcaatcatacaatgatatctttgccggtgacccgacttgggtgaccgaagccattggcggccgtttcaacgacggacgcgtgaaagtcaccaagacttctttccgcttcttgcagacgctatacaacctcggtccttctccggaaccgaacttgaccgtattgtggagtcccgaactgccggaaggtttcaaggatttctgcgccaaggtttccgtagataccagctccatccagtacgaaaacgacaacctgatgcgtgaagtgcgcaactgcgacgactacggcatcgcctgctgtgtatcctaccaagccatcggcaaacaaatccagttcttcggcgcacgtgccaaccttgccaaggccctgctgctcgccatcaacggtggacgttgcgaaaataccggaactgtcatggtgaaaggtattcccgtattgaccggtgagacactgaagtttgaggaagttatggccaactacaagaaggtactgactgaaatagcccgtgtctacaacgaggccatgaatatcatccactacatgcatgataagtattattatgagaaagcccagatggcattcatcgataccgacccacgcatcaatctggcatacggtgttgccggcctttccatcgccatagactcactgtctgccatcaaatacgccaaagtcactgcacgccgcaacgaaatcggcctgaccgaaggtttcgacactgaaggttcattcccctgcttcggcaataatgacgaccgtgtggaccacctgggagtagacctcgtttactatttcagcgaagaactgaagaagctgcccgtctacaagaatgcccgtcccaccctttctttgctgaccatcacatccaacgtgatgtacggcaagaaaaccggcgccactccggacggacgcgccaaaggtgttgcctttgctccgggtgccaacccaatgcacggacgtgacaagaacggtgccatcgcttccttgagctccgtagccaaattgcgctaccgcgactcgcaggacggcatcagcaatacgttctccattgttcccaaatcactgggcccgacaccggaagaacgtgtagagaacctggtaaccatgatggacggctacttcaccaaaggtgcccaccatttgaacgtaaacgtactgaaccgcgaaatgctggaagatgccatggaacatcctgaaaagtatccgcaactcaccatccgcgtttccggctatgccgtgaacttcgtgaagttgagccgcgagcatcagttggaagtcatcagccgttcattccacgaaagaatgtaatatgataaatgtacactcctacgaaagtatgggaacattcgacgggccgggtctccggctcgtcgttttcctgcaaggatgtccgttccgttgtctgtattgtgccaatccggatacgattgatgtaaaaggaggcactcccaccactccggaagagattctgcaaatggctatcagccaaaaggcattcttcgggaagaaaggaggtattactttctccggcggtgagcctaccctgcaagcagaagcgctgattcctcttttcaaggagctgaaggcgaacggcatccatatctgtctggacagtaacggaggcatctggaatgaaaaggtggaagagctctttagcctgactgacctcgtgctgctggacatcaagcaattcaatcccgaacgccaccgtacgctgacgggacgaagcaacgaacagacactccgcaccgctgcctggctcgaagaacatgaacaccccttctggctgcgctatgtactggtccccggttacagcgattcggaagaagacacccgcctgctgggtgaaagtcttggcaaataccagcagatacaacgggtggaaatacttccttatcaccgtctgggtgttcacaaatacgaagccatgggatgggattacaaattgaaagaagtgaaggaaaatactccggaacaactggaacgggcagaaaaactgttcaaagagtatttcacaaatgtgataaccaactaaaacagaaaagcaaggctgtccggatatgattccagacagccttgcttttcatttatagggtaagaatcctattctttcaagttataggtaatctgctgtacatcatcactactgccacccaccataaagacgaaatcaccaggttctaccatataattcatctcattgtcatagaatcccagtgcatcgtcagttatctgaaaagctacagttttgctttcacccacattcagatgaattttcctgaagcccttcaattcctttatcgggcgcgtaacagacgctaccttatcttgcacatacaactggactacttcctctcctgcacacttaccggtattagtcacttttaccgatacctccgtatggacgcctgcagccttgcccggcagcagtttcaaatcagaatatccaaaatccgtgtacgaaagcccatatccgaaaggataggcaggctcagtggaagcatcgatataagatgccttataggtctgtttcaatgcggtagggcggccggtgctcttattctgataataaatgggaatctgtcctacgtgtgcaggaaatgttatgggcaatttagccgaaggattatactctccccacaacacattgcatatggcattgccggcctcacttcccagccaccaagtacacagtaccgcatcagcatgttcccttatctcattgaagattaccggacgcccacacatgacaagagcaatgacaggttttccagtctttgccagttccgacaccagcttctgctgcccctcgggtatggctatattcactttggaagccttctcgccactctgaccgaatctctcgcctaccgccacaacaatgacatccgaagcctcagcagcctgcaatgcttcctgcaatccggtcaattgattgctcttcatatcatagccttcagcatagttcacctccagtcctttccggaccagtgcatcatacaaggtcaccactttgctccggtccgtagtggcggcccaagcgcctgccatatcgtattgggattttgagagtcctcctatcaaggctatcttcctcgtctgtgccgtcaacggaagcacggattccctattctccagcaatacaacggaacgctcggccatgcggagcgaagcattgcggacttcgggtgcattgagtattttggctgctctttccggattacagtagcgaaaagggtcctcaaacaatcccaactcatatttcttctccaaaatacgccgtactgcatcatcaagcacactctcctttactttcccttcttgaacaagctccttcagataagtcaagtagcaggtacttaccatctccatgtccagaccagcattcagcgctttggctgcggcatctttcttgtcagcagcataacggtggttcaccaattcctctaccgaattataatcagacacaacaaatcccttaaatccccactgctctttcaatagccgattgagcaagaaatcattggcagtacaaggaatattattaaaatcattgaaagcactcatcacggtagctgctcctgcctttatggccgccttatagggaggcatataaaaattggcaaagtggcccattgacatatccacactattatactcctttcctgctatcggtgcaccatatccggcaaaatgtttcatacatgccatgacagtcgtcgtgtccgccaaatcgtctccttgcaagcctctgacacgcgcctccgctacccgagaaccataataagggtcctcaccggccccttccatgacgcgtccccaacgtgcgtcccacgaaatatccaccatcggggcaaaaacccagttcaaaccatcggcggcactttccaaagcattgtagcgtgcagcttcctcaatcatggccaaatcaaaacttgcagcctcggcaagcggaagcggaaacccggtacgatagccgtggataacatccagtccgaaaattaaaggaatgcgcaaacgcgactgcagagcaagttcttgataacggcgtatgtcctttactcctatcacattcagcatagagcctattctgccttgccggacatactcttctttaggaatatttccaccgtcgggtccggtaaaattcccccggtaggtgcattgtgcaagctggcctatcttttcgtccagcgtcatctgtttcatcaaatcggagataaatttctccttctccgtagtttgtgccgaggtaaagctgttaccaaatccccacagacaaaccatcagtattattatctttttcataccgccattcttgttttgatatttattttatcataaaacaacagttgccttcaacggcaaatcagctgaagaaggacctgccagaatctcaaaagtccccttttccactacaaaccgatgtgattccacatcatagtaggcaaaggcttcctcatccagcaatatccgaacgcgcttggtttcccccttcttcaagtaaaccttatcgtagcctttcaactccttcaatggacgcggaacagaacattccacatcccgcacatatacctgagccgcttccgcagcatccatctttccggtattcttgatgtcaaagcttactgtaacccggtttccccccgtcttctcaacactcagattactgtattcaaaactactgtatgacagtccatacccgaaaggatagagcggctgttttccattccggtcatatcccctataacctacgaaaacaccttcggcatactgcacccgtttatgaggtacattgcgattgtcataataattaccatataccggattatcttcccatttttcctcgatgctgaccggcagtttgccacttggcgaaagcttgcccgtaatgatttcggcaagggcctttccaccctcctgccccggataccatgccatcaaaatagcttgtacattctgcccccaattgcggaaatctattccacctccggcattcaccaccacagtcacattatcatgaagtgaagccactttattaatgagatattcctgcccgtatgacaatgcaaacggacggtcgaacccttcaccttctgtactgctgttgaacccggcacatacaacaacattcctggcatgcttcagtgaagaggccaaacgctcctcatccatcattcctgcctggaaactgacagtcgcctcacccacattatcaaaatattcaatacgcaactggtatatctcccctgcactgacctgcataaatgcactgcgggtactgaatgaatggttcccccaatctccggtaatcagcttatcgtttacaaacagacggtatccatcatcgccagccagctggaacttgacagttccatccttgtcagccttgtaaactcccgtccaacgggcagaaaactgatctaccggcatgccgtcgaacggtgcaccgtatttccaggcatagtctatggcaggctctatggcagcctgaaagagctctccggtaagattacgagtattataatattcgctcttaaaaccgttttgcgtaaaactgtcatccgtataaatctgttgggacatatccttataaagaaggctgtcagacagcagctctatctgtctgccgcccttcaactgaaccataccgtcatagagcgacactaccgaataaggggtgacaaatccgcttccccctcctgtgggaataatatcggcattaggcccgattaccaatgttctaccgttccggtaaggcaacgtaccgttgtcatttttcaataagactactccttctctcgccaagtcaagtgcaatttccttagactgtgcattgtctttatcgatagatttatcttctctcggagtatcaagtgctccaaaagcaatcaatgtctggagtatatgccggactttggcgtcaatggtctcttccttcactataccattctctattgccggaataagaatttccctggtcatgaatttaccgacgggcatttccaaatccaaccctccattagcggctcccacaccggaatatacagatgtccagtcggacatcaggatacctttaaatccccactgtttgcgtaatacatcaatgttcagccagctgttttcggtggcatgcaccccgttcagcggattatagctatccatgaccgctcctactcctgcttcctgcacagcttttcggaacgcgggaaaataaatttcctgcaacgtgcgttcatccacatccgagctggcatgatgtctgctccactcctggttattggctgcaaaatgcttcaccgtagccatgactccctcttcctgcactcccaagatatattctttagctgtttcgcccgtcagataagggtcttcaccaaaatactcatagtttcgcccgcatagaggagaacggtagatattgactccgggccctaacagaatacttaccccacgggcctttgcatcccgggccaaaccatgtcccagttctctggccaacttacggttccatgtcgaagccgacaagatgccacaaggatacaaggtactttgagtattgttacgtatgccttgcggaccatcggccatcctgatttcgggtataccaagccggggcacagcacggatataaaaagatttgggaccggaaatgtaatcgattttttcttccagagtcatttgagaaaccaactccctggcacgttgttccgcctggggagtaatacacacttgtgcttttgccgtgattgcacaacaaagcaatagcccgcttaaggctactttctttttaatcttcattttgtctattttactacgtgtttgttatattgccgggcatgtcccgacctactttctttcttctcaatcaataaaaaaccgtgtcccttcattcaccaacgaagaaacacggccgaaagttattaagaaaattcagaatctacaagaaagcggacaaaaacatgtctgtcctgccatcaataagtaagacgtatgccggcctgcaacgtaaagttacacgggttctccttgcgtatagtctgtatcgacgaaccgtcatcaaagaaataggatactcccggttccacatacaagccaaccctattgcttatgttatactgggcaccgacagcacccatgacagaaagctgtaccggtttcacagtctcactctcagtaccaatcttgccatacacacatttttcaatggcaccccccgccgaaacatacatcgtaaagttctttgtatccacaaagttccagttagcccgtaccggaatgccaatataatgcagcttctggcttatcttttccgagctgccctcataccttacgtcagaagcaagataggtatacgtcagcccgctttccacagagaaacccttcgccaagtttttccgcaccgaaacaccgaaactgagcggttgtttatggtctatatccgcaattttcttttcgcgtctttgcagatagggcataccatccttaaaaaccagttcctgcccgtcgggaatagtaacaatgccattggccgtagaggataaatctacgttaccgccataaataggacttccaggcatgtagcccgacatgacattcgcttccccttcattcgccaatgaaaaacctcccgtatttcctacggacaagccaaccgcccatcctttagtatccctaccagaactgttttttcccggaagatgcagtttgtcccggcctgacggacgatagcggtcttcccttgttctctccggttcctctgcctgcattgtagtttcatggtctgtatcttccactaccggttcttccgcctgctgcccaataccgacagcctcatctgcagtttcaactggcagcatttcctcctgctgttcatcgccaaccgatattctgatatgttgtgcaaccaaagggcgacttgcctccttattgggcgccgatgcatttccatgtgcccgataggcaggctctatgggattagtccgtacggcaggtaccgtctgttccggcaagacatccggagccacagccaaagcaggcactgacgtatgccgcatttcattccctaccggactctgcaacagccacagactgacggacgatactgccaccagcagcacagctgccgcagccaccgcccagcgacggaaaggcatcatcctatgcgatccggttatcggagttccggaaagggacaattccttttccaaccgctcccatccggcaaccggcaacggttcggaatagtcttccagcttatcctttatctttttcaaccacaattcatcttccatacgttccttcatttaatcatttcttttcatccactcacgtacttttgccgctaaagtcgccttagcacgcgtcaactgcgaggcagaggatttttcattaattcccaatagtcgagcaatctccttatgggatttctcttcaaaaatatataagttgaatacagtacgataaccggcaggcaattcactgataaactgcatcagcaccttttgaggaatgacatctatcgacgaaccttccggttcttcataagcttcgggtgcattctccaaggccgatgactgattcatcacatcatttttccgcaaatactgcaataccgtattcaccattacgcgttccatccatgcccgcagagagccctctccccgccaagtgaacttatcgaaagaatcaaaaagtttcagaaaaccgtcatgcatcaggtcttgggcagtctcccggtcacctgcataacggaggcatacgctgagcatgcgtcccgcatagcgctcatacagttctttgcgggcaaggttgtccccttgcctacagcgttctgccaattcctgttcttccattctctcttttaacacgtgtttaccttaaaaatgcaactggcgcaaaaatactgcatcaggcagagaagaaaatcacacttttatttctttaacagtatactacgcagtatttagctcctaagttcaagcggataatgcaacaggagtgagaatgatgacaatgagaagatacgaaaagaataatttttcagaggaacagagaaagaagatttctttcccttttgttcccctgtggaaaagttgtttctttgcatcttccagttccccaacattcagttgcaatatgaaacagctaaccgaagaacaaaggtataacatttccgcttatctgcaaagcggaaagtcaagaaccgagattgccaatcttgtaggagttcatcgtagcactataagtcgtgaattacgtcgtaatagtgataaacgtaatggcatttacaaaccggatctcgctcaggctaagtatatgtccagaatgcgttcacgaaagcacttcgtgaagtttacggacgacttgaaaattcaagtagatatactcataaagaaagatttcagtccagaacaagtgactgggtttatgcgaacaaagggcttggaaacagtttctcatgagacaatctaccagtatatttgggaagataaaaagcatggagataagttgttatacaagcatttaagaagacggggaagaagtcataagaagagaggtgcattgactaatggacgtggttttatcaaaaaccgcgtggacatagacaagcgtcctacgatagtagacaagaaagtacgttttggtgatttggaaattgacacagtcattggaatgaatcacaaaggagcactattaactataaacgacagggtaactggactagtatggataagactacttagcgggaaagatgccagcccgctaactaaagctgccatcgatgccttggaaccttttagagaccaaatacatacaataacggcagataatggaaaagaatttagttttcacgaagaaattgcacgtaaactaaatacctgaattcaaacagacaatgcaacagtgtcgaattcattgttagttaataatttatatttttcctttggggtcatgtaacccaatctttttctcggtcttgagtttaagatgttttgaacgcgcattacctgttcattggttatgtccctaaagtccgtacccttcgggaagtattgcctaatcaaaccattgctgttttcattggctcctctttcccacgagtggtatggttttgcaaagtaaacaaaaatatttagtttacgtgcaatttcttcgtgaaaactaaattcttttccattatctgccgttattgtatgtatttggtctctaaaaggttccaaggcatcgatggcagctttagttagcgggctggcatctttcccgctaagtagtcttatccatactagtccagttaccctgtcgtttatagttaatagtgctcctttgtgattcattccaatgactgtgtcaatttccaaatcaccaaaacgtactttcttgtctactatcgtaggacgcttgtctatgtccacgcggtttttgataaaaccacgtccattagtcaatgcacctctcttcttatgacttcttccccgtcttcttaaatgcttgtataacaacttatctccatgctttttatcttcccaaatatactggtagattgtctcatgagaaactgtttccaagccctttgttcgcataaacccagtcacttgttctggactgaaatctttctttatgagtatatctacttgaattttcaagtcgtccgtaaacttcacgaagtgctttcgtgaacgcattctggacatatacttagcctgagcgagatccggtttgtaaatgccattacgtttatcactattacgacgtaattcacgacttatagtgctacgatgaactcctacaagattggcaatctcggttcttgactttccgctttgcagataagcggaaatgttatacctttgttcttcggttagctgtttcatattgcaactgaatgttggggaactggaagatgcaaagaaacaacttttccacaggggaacaaaagggaaagaaatcttctttctctgttcctctgaaaaattattcttttcgtatcttctcattgtcatcattctcactcctgttgcattatccgcttgaacttaggatatttttgtttactttgcaaaaccataccactcgtgggaaagaggagccaatgaaaacagcaatggtttgattaggcaatacttcccgaagggtacggactttagggacataaccaatgaacaggtaatgcgcgttcaaaacatcttaaactcaagaccgagaaaaagattgggttacatgaccccaaaggaaaaatataaattattaactaacaatgaattcgacactgttgcattgtctgtttgaattcagggcttttcaccgcattttctgaatgcaaaaataagttttaaacagaaaaagagctaaaacctaccacttatgaagaaactgagaatgacattggcagcatccatgcttttattcctgactgccattgtattgcaatcatgcctggacgattgggatgacgaatatgacactttgttcgccgtaggtacggtgaaggtcatcgaaggaaaagactactatttctcactggacgaaggcagtaaactatatcccagtgacacaacctatgttcacaactatgccgtaatagacggccagagggctttcatctacttccgcgaactggaagagaaacttccaggctacgaatacaatgcccaaataaagcacatcgaaaatattctgaccaaagacatctactccatgcctgccgaaaaggcggacagtatcggagacgacaacatcaacgccacggatttatggattacgggtgagtatctgaacatcaagtatcaattctaccacagtaacaacgaagataagaagcacatgctgaacctggtcatcaacgaagcatccaccggcgagaacgacaaaccggattacgtcaatctcgaattccgccacaatgcctacaatgatagccagctcacactgggcaccggactggcctccttcaagctggacaatatagcggaacaactaaaagagaaaaaaggactgaacatccgcgtcaaaagtctatatgacggtgaacggttcatgaccatagacattaaaaaagaaaacaactaaatctcctgaaaacacatttttcaacatctcaatgagaagcggagtaacatttcaatatgttgctccgctttgttttccataacttatcagaattcattgttcaagcaagtcagcctcaacgaagcgttgaacgcttcggcagacaatcgcgtcctgacctgtacctgcacgctgctcttcggctggacatcaaaataattgtcgctatatacactttcattgtcagcaacggacaagcatacggcacgggcaaacttgtctgccgaaaccgtcacttcatatccgccttcaatggaacggacttcgacctgcaaatccactttcggataattcatattcttctgcttgtccagacagtagttgttatggtacaccctgcccgatttgtccgtatagtctacgcggacatataccattcctctacctgccccctccagcagcttggcaaacggtgcggaaaaacagacacggctgtcattaccggaaatgccgacagatttgtcccagtgataaaccacggttccgtcgaaccggcagacctggagctgcagccggccggaagtattctccaagcggtcggacactgcatatactttcaaatcatccccctccactaccggagaaatcaggatgtcatcatagaccttgcgagtataatagtgctgcgccttccagcgtccgtaatagtcacggctcgcccaggaagctacgggccaacagtcgttgtgctgccagaaaagcgtccccatattatacggcatttggcggcggtgcgactcgatggccgtcttgatggcatctccctgcagcacatggttcatataaaggaatgcccggaaatcacgcggttttttatattcattcaacaggtaagtctcaatcagcccgttggcatggtcgccaccacgctgatgggacatcatcacctcggaacgtatatcccagtcttcggggtaaggagcatagcgcttgacggagtcgaactctggaaaagactgaaagccgtactcgctgaaaaagcgggatttctcgctgtcataatcagaaatgggtgctttaccatgccagacactccaatagtggcggtccccgtcagtagtaccggacatctctccctcgaatgcgaacggagaagaaggccaatagaaggttccgggtgcatactccctgaccaccccgggtaaggtgacatgatactgctgccggtactgtgcccaaatcttgtcggcatattccttgttctgccgttctatctcacgcttccagccccagcccagccaggcatcctggcattcattatttccacaccacaaagcaatgcaagcatgattgcgcaaacgtttcacattgtccaccgcctcctgatggatattatcgagcagggcgccttctgccggatacatgctgcaggcaaacataaagtcctgccaaatcatgattccatactcatcacacaaatcatagaaaacatcgttctcatagatacctccaccccagacgcgtaacatattcatgtttacaccggcggcatcgagaatcgtctttttataattctcgggagtgacgcgcggcaggaagttatccgaagggatgtaattggctcctttggcaaaaaccggacgcccgttcagctctatatagaaagtatgcccgtccttatccggctgatgtaccaccttcaaagagcgtatgcccaccctttcggttttagagtccaacaattccccacctgcaatgatatccgtacggaaacgataaaggaaaggctcccccagtccattactccaccacagcttcggcttgtgaaggacaaaatcaacggtcacccgattggtgcctcgcttcaaatccgcttgccactcgccaagcactcttccggtagcctcgtctgttatcgtgaccagcactccgtccatatccttatcggcatccagctccacatgtccggcaatcacggccctgcctgcaccgacttccttctgctcgataaacacatcgttgattctcaaatcgctccaagccctgatatacaccggacgccagatgccggaggtaaccagacgtgggccccagtcccagccataatgataacccgccttacgggcaaaaatgcttatcttcttgttgaacaagcccccgttttcagactggtcattggatgccggatactggtagggaagtgcatcccatttggggacgtctatctttatcggcgaatggaagtacaccttcagtatattattctcctccctgatgtactgcctgatggggatagaccagcggcgaaacatattgtccgctttcagtatacattcatcattcaaataaacgtcagcgtaagtatccagcccctcgaacacaagctccatattctctttccgcatcatgccggcagcaagagtaaagcaagtttcataaacccagtcttccttgtcaatccattgcaatcctcgttcgttcaaccggaaaaacgggtcttcaataatcttgttctgcagtaagtccgtgtggactactcccggaactgtagccggataccaattggtcagtctcgcctgccggaatttccagccttcatgaaggttctttaccactgtttttagtttcatacgagtgtgtttcatagctttctttgactactctaaattacggatagacaaaaatacgacattcaaaggatagtttataatatcttcttaacgaaacatgatacaatcccgtacacacctaccgggtcagcgtcgctgcacatctgctgcagtgtgactgcaaacgtgttgcagcgctactgcatatatgctgcagtgacactgcatatgtgttgcagcgccactgcaaagctgaatgcagtagcactgcaaaaagcatgcacttgctttgcagtggcaatgcattatcccatcgccttattatgaaaggagatgtcatccagctttcattatctataattaatttacaaaggcgtagtttccaagtctttcaaagcaaacggaggacaagcaaaaaaggtctacaaatcatagatttgtagacctttacccgctagtttttcatcttattcagaactgttgcggagagagggggattcgaacccccgataccctttaggggtatacacgctttccaggcgtgcctcttcaaccactcgagcacctctccttgttcggggcgcaaaagtaagggaagtttttggaattaccaaatgttcgggcaaataatattaaaagtccgttcaagcaaccaatgccggaacggactttcaacactcaataaaacatacttatcattaccgtgatctgacttcccgtctcatgaatatgacatacgaaagggcaaaacagataacagtagctgcaatcagtccggtgagctgcggccacaccaccaaaagactctgtcccaatggcagcgggctgggaatggccccctgaacctgctccatagtgagcggccccaaacttctgacggaaggcatcagcagtgttgtagtcgcctcattgaacagttcgctaggtgccagacgcatcagaccgagaataaatttctggtaactgactatctgataaggagatgccagctgcgaggggctcaacgccttggcaaccaggttgacaatcatcgtatagaacacgctgaaaaacaaccataccgccaccgaagccaatgccgaggtggccgcctgacggaagcaaagcgaaaacagaatggccagattcagccagaatgccacatagaatacactgattatgagaaagaatacaatcctccaaaattcttctgctgtgggaggaatgcctatcgctatcaacccgcagcccattacgaggaatcccagtacaaacagcattatacctatcacaatcaatgcagccacgaacttggcattgataatgcaatcacgatgaacgggctgtgacagcatacggctcaacgtccccttgttctgttccgaatttatagcatcgaatcccagcgcaatccccaacaacggccccagaaagttgataaactgcacaaaagaaggcaatgtgccgtccgaggctgtgaacaacttcaagaaaaggaacgaaccgtccgggtcattgggcttgatggcggcacctatgttggtaagcgaggtatagagtgagcccatgcacgtaagcaaaatgattcccatcaagataatgaaccgccaacttttcacatggtcggatatttccttgttaacgactacccaaaaaggataattgactttattcatgcctttcccctccttcctccatataatggctataaatatcagacaattcctgatgcttgtccttcaaatcagacatatcaatcaaggtgaccagcttcccactgttgaacagtcccacgcggtcgcaaactttctgcacctggtccaggtggtgggaagagaacaagacggtcagtccctccttccggctcaactgcctaatgagctcgatgaactcctgaacaccggcaggatctattcccgaagtaggttcatccaggattataatttccggatttttgataagcacgtccgccagtcccaatcgctggcgcataccgcgcgaatatttcccggtcttctttttcatctgtccggcaagccccacatgctccatcagctccagcgccctgactttcgcttcggcatccgaaatgccattgagacgcgcagtatatataaggttttccggaccggtcatgtcatcataaaaccccacatcttcgggcagatagcctatcttccgctttacctcgataggatgcctggtagagtcgataccgcaaatctccacagagccggaagtgggttccgtcagtcccagcatcatcaggatggtagttgacttgccggcgccgtttggccccaataatccgaaaatctcccctttacggatagtcaagcaaatgcggtctacggcagtgaagcgcccatactgcttggtcaagtctgtcaatgcaatcactcgctcgtccatgctcacctccttccatatttacggaacagatagcatacggcacctatggcaacgattattatcaaaacgcccacccatccccatatcatcggggttttcacggcaatgcggaattgggcgtctgtattcacttcaggagttttggccgtcatggtagccacataatctccgggcaatgcctttttggatgctttcatggtagctacgacattggccgtttcccccgccttcagcatatcaatcttcgaaggctcaaaagacacttcccagtccacgggcttattggcagaaagctggatatctttcaacaatgaagagccggtattccggaccaccaactcgatacgcttcacatctcccgctgtgatttcggtactcaacaatcctctgggcgtggacaattccatctcgtaggaacccgtgacaacaacttccagctccaagtcggcagaagtcgtaccggtagccgcacgtaccggaatcttgtaattgccggcttccacattggcgggagggacaatctctatactcacattctggctgctgttcgcttccacctgggcagaagtggcctgcttatagttgggcttgaacacgacactccagcctctgggggcattggccatcagcgcatacagctgctggtcggccgtctggtttttcaaagtggcattgaaggtaaaggtggacttggaattgccctgcatattgggctggtcggtagtgaactcggtctggtaagttcctttctgggccacgaccacctccagcggcagtttggtttctccggcaaatactgtgaaatgataacttcctttatttacttttagaggaacttccactttcaaattgaacgttttcttttcctggggcagtacagaaagctggctgagggtccagccgcctgacttgatttcatgcttccaactgcccggcaatccattgaccgagagatttgcatttgtaatcccgtccgtattgttaatcaaatcaatgctgtaatcaatggacgctccgggcgtcacggaaatttttgtgtaaggagtgtacagaataatgcttccagattcatcggcatgtacacgatttaagggaaaagctcccaacaaaatagctaacaataaaatacaatttgttctcatagtcataaaaaagttcttatggttgttttattatgaatattttcccaatttgtgcgttacaaaaataaaagatagctatattagctggtgttaaaagaaacaaaagaatataattgcggacacgatataccctacaatgacctgcttttcttatctttgcgattcctattgatacaaacgaataccataccgacatgagaatccctgaaatacgcttacagaaccagcaactgtccactccactcttccgccacccgaaagaactggtctcctggatgggcgccatgcaggcacaagactatacaatggtgaaatgggccgtaggtataaggctgaagtcaccgggaattcaagctgtggaaaaagccctgcatcaaggggaaatactgagaacccacgtaatgcgccccacatggcacctggtagcagcagaagacattcgttggatgctgaaactctctgcacaacgcatcaaatctgccaatgattcctatgcaaaagggcatggtctggaaatcacggaacagcaatatgaaagaagctacaccatacttgggaatatcctcagcgggaagcgaagcctgacgaaacaagagattgcggaacattttgaacattcgggactgcttgcagacaactaccacatgacccgcttcatgtcgcgtgccgaagtcgaaggcattgtgtgcagcggagaatgccgtggacggcaacacacctatgcccttctggacgaaagagttccacctacccccgaactaacgaaagaagaagcgttggcccgcctggctacagcctatttccgcagccatgcccccgctaccctgcaagacttctcctggtggtccggtttgcctttaacggaagcaaggcaagccatttctctgatagaaccggaactgatgtccgaacaatggcacagccagacatggtacatccatgactcctgccggacattaggaaaggcgaccgacagcctgcaccttcttccctcctacgatgaatacctgataggctacaaggaccggacgaacgtcctacccaaagaagactattccaaagctttcaccaacaacggattgttctttccggtacttctctataaggggcatgtagtaggaaattggaacaaggcgtccaagaaaaaagaaatcttcccggagctttcgcttttccggaaagatatctgcctgaaagaggaattgctgaaccaggctaaagaaaggtatgtctggttcctaacacattaaaggcggtcatcgaagatgttcattgaagaatctctctattttgccgaatggaattacctctatattgtcatacaagtctacatggtttgcaccgggaataatcaacagctccttattatcaccctgcaactttttaaaagcatcttcactgaaataacgtgaatgggccttctcaccgtgcagcatcaacactgcactacggatttcatcactatatgaaaggataggcatattgatgaacgaaagcggtgaagtcttgttccatccgcggttagaattgagtgaccgcttatgatagccgcgcggtgttttataataggcatggtagtccttcacaaattgtggagcatcggcaggcaacggatctactacacctccttcaagagcaaatgtaccgtttctataatcctccgtacgctgagcattaagctggcgccgcaattcgtgccgtgcatcagcattcatagaatcaaaataaccgttagcattgacccggctcatgtcgtacatggttgccgtaactgtagccttgatgcgagtatcgatagccgctgcattaagcgccatgcctccccatccacaaataccgagaatgccgatgcgctctgcatctacatcgtcacgggtggaaagataatcgaccgctgcactgaaatcttccgtattgatgtccggcgaagccacataacggggctggccgctactttctcccgtataggatggatcgaaagcaatcgtcagaaatccacgttctgccaatgtctgcgcatacaagcccgaagcttgttccttcacggcaccaaacgggccactgatggcaatggcagacaatttacccgtcgcattcttgggtacatacaaatcggcagtaagtgtaatgccgtaacggttgtggaaagttatcttcttatggtttactttatcactctgtggaaatgtcttgtcccactcctgaatcagattcaaattctcttccataaatttattatcattattaggattattttctgttgcagacaaatgtcccgcagcacaaaggctaataaccatcgccgcacatatgttttttaccatgttcttcatctctacttctttaagtttcggctggaaattcatttcttaatccattgcttgacagtttcccggcttgctccattcagcagcctgccttttccccagtttatgccggggtaattcgtctgtaattccttttctgcattaaaaatactgctgcttcccgaagtggcgaatggaataaccgttttacctgcaaaatcaccgctttctataaatgtattgataattcttggagccaaattccaccaaataggaaaaccgatataaatagtatcatactccgcgagactccccagtttagaatacaatgcaggacgcaatttggaatccgacatttccacactgctgcgcgaagctttgtcatgccagtccaaatcagtagccgtgtactttttcgcaggctgtatttcgtagagagtcccatcgacagtttctgccaccaacttggcagcccttgccgttgttcccgttgccgagaaataagctaccagtgtcttaccaccttttttctgtgcgttaacaataatagacaacagcataactgccatcataaacaataccaatcttttcatacgatatattatttagttgaaacatataaatccaattgttatagcgatacaaaagtaacgggtattattattacataggtatccagattactgattatataacccaaattactgatagatgtccgagaagagaaataaaaaaacccgtaaaaccttgattttacgggatttgtcatactttgagtcctttttgtctttggagttctgcggagagacagggttttgaacctacaactctaaccgcttatatttcagctactttgctttcaaaatttcaaataggtaacgaaacagtaacgattttcagatgttgggcttgtccaactttgaccgctgtttgtctgcctaactttcgggttcaaagatacggctttcttttgaaactcgcaaatatctgataataaatatttttgggttagtgcaaggtgcaagctatatatataaatatatacttgcaccttgcactaaatttttgaagaaaagaatagtgctgtttgcttaatccagatttctttcatacatttgcataccatatagtatggtattataaaaacgataatatgaagaaagtagagaaaaaacaatggtttgttattgggcttcaaattatagaaaacaatggggttgctaaaatcacaatagacaacttatgtaatctcttagaaattacaaaaggagcgttttatcatcatttcaaaaatatagacgggtatatagatgctcttatggctttttgggtaaaagagaatacacttgcatttatcgaagaagtagaaaaattagggagttcaaaagaaaagctacataccttatctcaaatgtctgcttcctctgaatacaaatgtgagggacggattagagggtggagttatacaaatgatattgtacaacaatatgtcgcacaagtagataaattgagattagactatttgacaaagttaatccaagattgcggatatgatgtagagtatgcgcataaaatagctactatccaatattccttattgattggattgcaacatatctgtcctgaaatccctgcttgtgatttcaatgaacttcaaaatatgctgattgaaaaatttgaaacaaaataataaaggtaaaccatgaaacagaaaaataacttgattatcaaatatctcccagcggattataaagattgtttttgggatgaaatcacagaaaaaccatatatgtctgtaaatgaattgttcaatttaatgttttctcaatatccaaaatggattatgaggatgtattatatacgcaacttaatcgtaaaaccgtttggcgtaaaaatcaataaatcatttgtaaatatgattatagaacagaatgataatgaaattattataggagccaaagataaacacctgacatttcatgtatctttattctgctcggatgttaaagataaaacacaggaagtcagtataactactattgtgaaatacgagaatatcttaggcaggatatattttgccgcaatatggttattccatagaattatagtttcttatctattcaaacgggctattaaaatacacaacacataggtctgttatgaaagatgaagtagataagatattagcgcaaatagaggttgatatttcagaaatcgacctctacggctatgatattatcgaaacttctctttcaatggtacataaactgcaaacagttcttgatgaattaagggcaaaaatacaaacctatatatttccaaccaaagaggatgaaatcttatttttcaagacacagaaaccggaaatacttgcccggctattattcttctataagatttatcgaatagaaacacaatgccctaacggtagcgatgaagtgattaggaattatatcaatcgggaactggataatctgacctatttcttcaatcgcaatttggacttttatcaatattatcgttcacgttcaacagtgtacgatgaatattattttgttcggggcaaagcggatttgcgtttatgcaccgatagcgcacaattcgataaagaccctaatttctcaaccggatatgactataaagtggcaaagattatcgccaatgaaatgctacgcatttatctgaataaacggttggtgaaactggtaacgaataatcagatagaagataatctacaaagatgcttcaaatacccgttccgtttcactggcaaaaaggcatatcttatcgaactgggatattctcttgtatcttcgggtgacatcaataatggcaacgtggagataaaagaaataatgaatttccttagcacgatatttcatattgatttaggggattattacgcttcatacatagccatgaaagagagaaaagaccggacggcatatcttcatcatctgatagagagccttgttaagcggatgaatgaagatgatatgaaataatcctctgtatttcaataaatagaagtaccatgtttaccccaacatggtactttctttttatagtgaaatgtacgttgagaaatggcattttttcagagatttcacaccgatttcactctaaaatagtttgaaaaaaagtaataccatgatagatataaccatgacttttaggttatttcttctcccgaactttgcggcaaatcaatcagttaccgttatggaaataataacattcgagtccaaagcctacaaggaactggacaacaagattaccgccattgccgactacatcttcaaccacatggaaacggcaaggcaaagcgaggaagacatgtgggtggacagctacgaggtctgcacgttcctgaaaataagcgaaaagaccctgcaacgcctgcgggtgtcggggactatcgcctattccaacatcaggggacgttacttctacaaggtcagcgagatacgccggatgctggaagaacgcctgataaggagcaacaaggagaacatcgacaacctgataaccaaccaccaattatatgctaaggaaagaggaaatcttagaaagaacaagtaacgggctggcggtattcaaacactacctgcccggcaattggcgcataggtcgcaacttccttaacccgctgtacgaggacagcaaggcttcctgcaacatctatttcgaccgccggagcggtatctacaagatgaaagacttcggcaacgacagttacagcggcgactgtttcttcctcgtggggcagttaaaggggctggactgtaaccgggcggctgacttcgtggagatactggaaatcatcgaccgggatttgggcttgggactggcttccggcattccggtttccgttcccccggcaaccgtccgtcgggcagtgccggacaaagccgaagaaacgcccgaaaagcccgtcaagccctaccagttccgggaacagaagttcccgcttgccgaactggtgtactggcaacaatacggcatcacgcccgaactgctggaacgttacaaggtctgctcgctccgggaatacaacagcgaaacggcagagggcaaaccgtacacctacacttcatcggtggcagaacccatgtacggctacaagggcaaacagcacatcaagctgtaccgcccgttctccacgccccgcttcctctacggcggcagcttcggtgagaactactgtttcgggctggaacaactgccagccaaaggcgacacgctattcatcacgggcggcgagaaagacgtgctttcgctggcggcgcacggttttcacgctatctgcttcaacagcgaaacggtgacgataccgcccacgctggtctatcggttgacgttccgcttcaaacacatcgtcctgctctttgacatggacaagacgggcagggaaagttcatgcaagcaggaaaaactgttggaagaatttggcgtgaaacgcctgctgctaccgcttccgggaacgaaagaggaaaaggacatatccgactacttcaaagccgggaacacccgtgaagatttcctgaaactgtttatcgaatttttagacaacctgtatagcgacacattgattatgcttaaatcgtgcgagatagatttcaacaacccgcccgccaaagcgcaagagattatttcggcgggtgacgttccgctggggacacaaggcaacctgttcggcatcaccgggggcgagggaacgggaaagagcaattacgtagccgcaatcgtggcgggctgcatctgtccggctggtgcggacatagatacactgggcatacagataaccgccaacggcaggcacaaggcggtattgctctatgacaccgaacagtcggaagtgcaactgttcaagaacgtaagcaacctgctggcacgtgccaaacagccggacaagcccgatgaactgaaagcgttttgtcttaccggtatgtcacgcaaagaacgcctgaacgccattgtacaaagcatggacaagttctactaccagtacggcggcatccagttggtcgtcattgacggcatcgcagaccttgttaagagtgccaacgatgaagcggaaagcgtggcggtgatagatgaactttatcggctggcgggcatctataacacgtgtattctgtgcgtgctgcacttcgtccccaacggtttgaaactgcgggggcatttgggcagcgagttgcagcgcaaggcggctactatcctgtccattgagaaagacgaagaacctacccagtcggtggtaaaagccctgaaagtaagggacggaagcccgctggacgtgccgctgatgctctttgcttgggacaaggaagccgggatgcacgtgtacaagggcgagaaaccacgtgaggaaaaggagaagcgcaaggaaagggaactggtgaatgtcgcacgtgacatcttcgggcggcagacacgcatcacctacatagacctttgcgagcagttgcagcaggtattggacatcaaggagcgcaccgcaaagagctatatccgcttcatgcgggaaagggacatcatcaccaaagacacggcgaaccaaagctgttttgtcatcggttcatataatctttaaaggaacgcaagctgcccgtaggcgtatgggctgaacttgtgtatttttaggtgcttgtgtcctgccctgcccgaaaacacggcaggattttttctgtttgcacgtgatttttcagggtatttgcttaactttgcagaagttacacggaaaagtaacggcagttggacggcggttgccggaatattgcctttatatataacatatacgttcgccgaacgtcccaaagtagaaaactggcacttttcaaaatgtggggatattcagcgcaggatatgctatgcgtttgtcatagcgtggctgcactgtttccacatttgggtatgccagtacctctactttgaaacagcgtcatgccacgctttctttttgggggtggcggctaacgtgccaagacagtagggatttatatcactttaatacctgataatatggaacaaatcaaagcgcacatcgccgtatcgctggacgggcataccgccacgccggactatgaactggactggatgccccgtgaggtcaaggaactggtggcaagggaacacgccgccgcaagttgcctgcttatgggggcgaacacctacaactacatctttgaacactggggcgggtggccgcacaaaagcaaacggtcttttgtggtgtcacactacgacaccaacgttacaccggactgcggggtggagttcctgaccgaagaaccgctgcaaagggtctatgaactgaaacaggaaaccgacatgctggtggtgggtggcggcaagctgcttacttcattgattaaagccgggttgctggacagcctgacaatatacaccgttccggtcatggcgggcaaaggcatcggctttatcggggaaacattcggctcacattggcaactctcggaaagcagggtgctggataacggggtggtctgttcgacctacctgtttggcggcagcgaataaaaaatgcgcccggttcccgccgggcgcaaccactaaaatttcaattattataagttgcaaaacctatcacaatgaaatttcaatggcaaagataggctatttcttcggtttcgctttcttttcggggaatgaaaaaccgacattgaactgctcgtccagtaccagcgaagcatcgaaagccttgccgttcttgcccttgaagcccttgattaacccggtcttgcgtttagtcaccagctcgacaatctgcttgtcggaaagctgcttgtcgcacttgttgcggaatatggtaagcgtgcagtccacgttggaacacttcgccactttcgggtagaacaggatgcgcccgctgccgcatttcgggcaggggcaggtttcaccagtagcgacagatagctgcaccgatagcagttctgcggtgatttgcgttgcgtacacctcgatgcccttccggaacgtgtcggcatccatgctgcccgcttctatcttggcaagggcggtttcccacatgcccgtcatttcgacatcggcaatcttcttgtccctgacaatcctgtaaacggcaagccccttgtcggtgggtacaaggttcttcttctcacgcacgatgtactggcgggcgaacagcgtttcgataatcgccgcacgggtggcgggcgtgcctatcccggcatctttcaggctggctttcagttcggcatcttccagttccctgcctgcgttctccattgccgacaacaggctgctttccgtgtgcagcggtttcggcttggtctgcttttcgagcagatccacgccggagagtggcaaatattctccctcttggagtggcggcaggctggcggcttcttcatccccgccagtttcctgctcgccgaacacggcacgccacccggctgctttcatcacagaccctttcaccgtaaagtcggtatctccccctgacagcaaggcggtggtaacgtctttcacgcacttgcccgaaaaggcttccagcatacgcccggctaccagctcgtaaaccgcccgctcgtctttggaaagttcgccgggcaggttctcggtaatgattaaggcgtggtggtcggtcactttgctatcgttcacgctgcggcggttcaggggtgtgccgtccagcccggcggcatacccggcaaagcgggagtattgccccagcagggcgacacgttccggcatttcatcgaaaacgtcctccggaatatagcggcttccggttcttgggtaggacatcactttcttttcatacaggctttgcgctatggaaagcgtcttgtcagccgagaagttcagcttcgtgttcgcttccttttgcagcgtggtaaggtcgtacaaaagcggcggttcttggcgagggcactgaaaaaggctctctaaaggcaataaaatgaaaggttcgccaagtccatataattggatttggcgaacttatttttctacttttgaatctaagaatttagcggttacttgccctgtaaagcttaaaaacggccaattaagggctttttagagaacgaaaaggctctcccctcatctgagtttgaggattctcttgatatttgctacaaagataaccatagccccttgcatacgcatacattctattccgtatgaccatgctcggtcataccctaatacattttttaattcggagttcttggcctctatcttatatctcacttttgctttactcctgaactcttccgatttctcaaacgcctcatgctgctgatgctctgatgattttatttgaacagaatatgttttagattttgcgccttctttgtagcatccctctcgccttgaacataacttgcatttatctacatcaaagaaatagaccattgactgattcgttccctgtcctttctttccttgtacagcgcgcctaattgccatatggccagccgggcaaacaaacatgccagcgtctttattgaaatcaaatttatcctcatccttacggaatccattgcttatggctggatttaatcttgcaactagctcaaaaccattctcttcattgttcgataatatgatgttgtctttacctgaataagctgtgtctccaacgactgtttccaccgtcattccgttggcacggctctggtttaccagctcttcaagttgtgggccatcacccttctctcccgaagtcactgtggcggcagtgattatacgctcatcgctcatggcaatatgtgtcttgtagccgaaaaacgagtcatcctcgctcttgtgacccacccgtgcatcttcatcttttgatgtcatataatggtcttcaatatcggcaagtacctccttgagcatattcagccgctctttgaccttgggtatctctgccaatgagggatttgagctaactacatcaagcaatgcctttgtatagtcaagctcatgctcaatgttgtcatccgtgttcttcgaaggcagattgctcttttcggtctcgtcggcatcatatatgcttttgcgcaattgcttcgagcgcaatcttagactctccaagggtgaccaaggattgctgcgtgagccggtatgggtggcatcaactataatcgtgcgagactttattatgcccttttctatagctatgccaacagtcttgccaatcagcaaatccagtagatctttatcttttagacgcaacttgcgaaacttgcataatgagctcggattaatcaaatctgtttcctccggactcatcccaagaaagtatttgaaagacatatcatatcttgatcgttccacaacatcgacatcggatatgtcatagattgttttcaacagaagatatttgaacatccggatgggacattcggccatccttccattgtcttgacaatacttgtcaacgagttcttttttaataaaagaaaagtctatcaaatcatttatctgacgcaataggttgttacgaggaataatcaaatcgtatagatccgaataattactgaactgtatagtctgttgtagtggtagcatatctgtctgattactaccataaagttacaaaaaaatcggcacatactcaagcttttgcctgaatatgtgccgatttttttaggacgctactatatgggggactttttcagtgccctcgttcttggcaggcttctttcctctcaacggatttaaccacaagttgcccggcatcctttacccgttgcagggcggctatggcttcgggttgctgttcccacttggcggtcgattgggcggtgaaacttattcccccgctggcggtcgccgctttgagttgccaaaacttggcgggtacgaaatgcttgttctccaaatagcggctgcatatcatcacaagcgtgggtgtctgcaccctgcccagcgagaacaccccctgcccggcggctacgctcaacgcttgggtggcgtttatccctatcagccagtccgcttcgctgcgggacttggcagagaagtagaggttatcgtaacgctctcccggctgcaagttatccagcccctcacggattgccttgtcggtaaggctgcttatccacaggcgcacaaatggtttccggcagttcaggtaatggaagatatagcggaagattaactcaccctcacgcccggcatcggtggcgacaataatccggtcgcactggtcgaacacttcctttatcactttcaactgtttcagcacgccggggtctgccttgtagcctttctccgcttttacctgacgggggattagctggaaatcgggcggcagtatgggcaggctctccctgcggaagttcgccacgccgtaggcttccggcatggcaagctggattaagtggccgaacgcccatgtcaccatatacccgttgccggaaagataaccgtcattacgtccggtcacaccgatgatgcgggcgatgtcctttgccacgctgggcttttctgctatcaatgcaatcataattctttactttttaaggtgggtactacattttcattcctctggacttcttgggcttgtccgctttcaggctcttgtcctgcgccttgtcctgcttctctttctgcttggcggtgggcttgtcctgaccctgtttcaacggctctttgccctgcttggtggcttcgttggtcttgccccccgaattgaccgctacctgcgtccggctctcggcggcgggggtaacgtctttcggctgcaccttgtcgggggatttgccctgtgcgccgggctgtacatgaccgttgaactcaacgcccttgccgtcctttagcccggcgacctgccgctctgcgggctgctgcccctgctgcaagaactggacggcagacctcggcaggaactccaagccacgctccactgcgctgacctgcaaataggcactgcgcttcgtgccgtccctgaattgcaggttttccattttcaccgcttgcccggcttcaaaggcggctttctgttccgagctgacttgcacgttacagattgtatcggggcatttccacttgtcagcccgcatatactccagttcgtgcgtgtacctgtcccggctgacgaacacggggatttgctcgccgcttttcgggtctttgatttcagcgatgccgcccaagttgccagtgccttgcaagttgccctgttcctgcttggtgaactcgtgttcatggaacgggcgttgcaacagtttttcgtcctgctgcacgccgtgcagcttgggtactaccgtgccgtcctttgcctgatagaaagagagcttgacatcggtaggtttgaggtagaagccgcccaccgtccccgaaacggtgtaggtgttgcgggacttgtagccacgcatcacccggtcgaagtccctcgtgtttttcagggtgtcggcggtgatgccgacttttttcaggttctcccagtcgattttcacagggtcgaagcggtagccctgcttgaactcgtggaagtcgggcttcggaactcgaagcatttcagcccgcttgccgccctccggtgtagggttgcggtggttgtcctcgattacctttgcgtcccgctccgcttcggaagccttgacgctgaacagttccagcccggaagtgtcctgatacttgcggtagaagttggaaatgaagttgctgaacacatcgctgttcttgtccacctgcatgaactcgccgccgtgtccggtagtgggtggcacggtctgcaaattgccgtccttgtcgatacccttaacggcactcacctttccctgctgtttatccaagaccagcagcacgtctttttcctgcccctctgcgggcggggtcattctgtttgccataaataattggaattttagtggttacgggaatagtcccgcccaaaggtagcgactaaatatgctatatttggacgggcggcaaggactgtccgaatttgtcctgcgttgtctgaaattgtccgggtggggtaaatctccaactgacggttggagaattggaaacaggcataaaaaagagagcgaagttaatcaccctcttggggtgagccatttatgagccatttaatcataaaccttatgccttataatcaacaacttattaaaatttacattatgcttgcgagccatttgtgaagcgtttggcaagcctttgattgtgtttcctttattctcttattatcaggtgacacgacaaaaagaaaacatcttcggcaaaatatttgttatgtttttgcaggtgattacataatatactatctttgcagatagaaacaaaggacagaaatatggcttcattcagaaaagagatacttgggcagattgaacggatagataccgggcgtatattcacgttccgtgatttgtcgtttgaaacggaaaagaccgccaatgttgcggtgctactctccgaacagagccgcaaaggggtactggtgcgggttgaaaagggggcatactaccgtcccaagaaatcagtgcttgggctgggaaagctgcctgtctatcaggatgaacagttccgctacctgactgaaaaactgaacggctatatcacgggggcttacgtctataataaaatggggctgaccgaacaggttgccacaaccataacgatagccactcctaacccggttcgccgtttccgtttcaagaacttggatatagagtgcgtgaaagcctacagcatggactacccggatgaaagccttgtcccgtacttgcggctactcgatgcgataaaggacatgaagcgcatacccggaacaaccgggcaggacatctacaaccgggtcaaaagccaatatttcaacgggtacagcctgtcggaactggaaaaaatcgtatctttggcgaaaagttacccgccacgtgtcagaaaggtggtggcggacatattgggcgacattagacaaaccgtgttgcaaacggaaatggcaaagaccattcttcccacgacacggttcaacttggattataaaacggcataggacagaaatatgaatttacattcggacaaggaagcgttcaaggaaatcatcgcactggcggctgaacatttcggctacgagcagtcgcacgtggaaaaggattactgggtatcgaagatactgcgggatatttccatgtccgaatatgcggataagacctacttcaaaggcgggacttcactttccaaagcctacgggctgatagaacgcttctcggaagatttggacttgttcgtgttcacgggtgataaaggtgcgtccaagcaggcggaaaagacattgaacaagaaactttccaaatacatagttgaacttaacaataacatatacaaggaagatttgtcggaaacgggcggtaattaccgcaaactgtatttttcgtatgacaatgtatttcagagtgtggggctgaaagaacatttggaggtagaaataaagtcttgtgacctgccggacaaaaaactgatgttctacccggcggacaaacgggttatcaaaccgattgtgaccgcctttcttgaaagcatcggacaagaggaactgataagcacctacgggttggaaagttttgaaacgcagtgcatcaatccccgaaagactatctgcgacaaggtttcaaggctggtaaagctgtcttacaatgaggatgcagccgtactgctggcaaagcatatccgtgacgtttacgacttgtcggcactctatcacaatcaggaatataacgattacctacattcggaagatttcttggatgctatgtaccgggtgacgatagaggacggactaaataaaaactcccgttcgcacttatcgctggctgatgcaccgatattcaaggatgccgaatcggtcatggcgttgcccgaagtggctatagcatacactaccgatttgaagaaactaacttttgacaaaagcaagatgccaccgattggcaaggctgtggaagcattgaagaacctacacgaaatactgattaaatttgaaatttatcggaatagtatataattatggcaaatgtgaaaagaagatgttttacccaagctacgttagaaggtatcgccaaaatattgggagatacaagtaatggcttaacgggaagtgaaatacaataccttttacaacaatctcaaattgaagatgttgattcacaaaataccaaatggaaaaggttatatagtgcttttgcaaattaccaaaacacacatcagtgttctaacaaaatactttattttattcaattagctttatctcctgctaaatttgtaaataatgagtacgagtttacagaaaaaagaaatgcaataaatcaacaattagcgtttatcggctatcaactaaatgaaacaggaaaatttagtgaaataattcaagctaaaacgatttcagaagcgcagcaaaaagcagaaaacctaaaaacaaaattagagaaccgcaacacacatttggctctctttaaatattgtaaggctgagttgctaacaaacaactattttcatgctgtctttgaagcaaacaaaggtttatttgatagaattagggacttgtcattgtataatgaagacgggaacaagctaatagagtatgtatttagtaatacacctatattaattataaataatttccagtcaaaatctgaaatagacgagcataaaggattttgtaaccttttaaaaggattatgtggaatgtttagaaatcctgaagctcacgaacctaaaattagctggaacataacagaacaagatgctttggaaattttagcaatgatttcgtattgccatagaagattggataatgcacaaaaaataagatagcagaaaaattccgctatcctatttcattatttattcttcctctttaatcaaatggcatagctccgggtcgttcttaatccgggttatctcgtcctcaacaatctgccggacttcctgacggatgcggtcataattggcttgtatctcctcctgcatccggtcgttgccgtccttgtcggtgaagtcgattatctgcggcaacttcacgtaacgggcggtttcccgcttcaccttttcattgtccaccacgatttcgcagtggaaaatcttctgctctatccgttcatcgaagttgtccgccaccgcacccacgaacatgccttgcgtgaggttggatattttactggcgggtatcaggctgtccatttgggtgcttatcgaggtggacttctcccgctggtttatcgtcatgctctgccgtttctgcaacacctttccgaaacgctccgacagtatttttgccgtttcaccgactacctgaccgctgaacacgttgcccaccgtattttggattactttgctttccttgtccccgtagtcacgggtaagctggctgtaatcctgaaagcccagcagaacagcaaccttgttgcttcgggcagtggcaatcaggttatcaagcccacgaaaataaatcgttggcagctcgtctataatcaccgaacttttaagctgacctttcttgtttatcagcttcactattctactgttatataatcccagtgccgccgaatagatgttctgacggtcgggattgttgccgacaaccagtattttaggctctttcgggttgttgatgtccagcgagaaatcatcacctgtcattacccagtaaagagcgggtgaaatcatccttgaaagcgggattttcgcacttgctatttgaccctgcaactgctcttgagcatctgattcccaagcatctacgaacggcgaaaggtagttttccagttcgggataactgcgcaaaatagtgaatacatcggcgtatttcttgttcaatagttcaatggcatgggggaacgtgcaatacttcccgccctgatagatacgcaagtaccaaataatggctgcaagtaggataatcgggctttccacgaagaagtcgccctgcttgcttatccaacttcgattgaggttaagcataatcgtgtagctggcttcgtaggcatccgcaatgtccgacatgaaactggcgtttatcgggttgcatcggtggctcttgcgggggtcgtcaaaattgataatatagaatttgggcttgaccttgtagccgtccaagtgattaagtaggtgattgtaagcgatttccgaaaggtcagggaatttgtaatcataacagtaaagcgcaaaacctttctcgatttgctgttttatgtaaccgtttaccaccgcatacgacttaccgctgcccggtgtccccaacacaaggctggcacggaacgggttcacgacatttatccagccattattccatttcttcttatagtagaaccgggtaggcagatttacggaatactcgttctcgataagccttgtttcctgctggaaactctcgttctcggtattaaagacatcatccattaggttgttcttcaacagccgggacatccatgtacccgccatgagcatacagatatagcccgccgacagcgtggcgatataaaacacggcatccgccgtgtgtggcaacggaagttccagcaaccaccagttcaggaaaaacaacacgacacccgccgcaaggctacaatgtatcttcgcccacgttatcttttcctctttcacgcccttagtgccgatacacgacagggcgaggaacaccaccgaaaatagttttgtccaaagaacggacgagaacagcccggtggtgcgctgaaagttccacagtatcttgtctatcacttcaaaggtcactccccactctttcagggtggagtaacagaaccagtacacgtttattcccacgaatagaatactgacagcccgcataaagtccatgacccttgcaagccctctcaaatcatcttcctgttgcatgattgtaatgtttttttaagttagtcgatgcgccttgtgcgcttttttttcttctttctcttttggcgggcggtgtcctgcggatcgtcaccgcctgatgcaccgccgcccagcaatccaccgaacgcacccagcacggaagccacgcccgaaacgatgtcggatttcggcgtgaagcccggctgttcctgatgcgtggattgttcccgctgttgtatttccacttctgactggtatatatttccagtttcgcccgaaaaacgttcgttgaacacgttcgccgaatacttcttgcccaagcgtgaaccgttcagcaccacccggctgtcgtggtcgatgaacgtaacgccgtagatgcgcccgctgtcattctgacggaataccacgtcaatgccccgcttctttagctgttgttccagttccttgcggctgcgggcggtctgcatggcagtggctacaatcttccgggtgcgctctttcagtttcccgttcttgattgcttcgcccgatttctccattctgcgctgcaccgcttcataacccaccgacttgcagatgcgggaagcctttaccggattgcctgtcttttcgcccttgtcgttcatggcggaatagactatgccctgatagggcttgccgtttatctcgcccttgacttcctcggcgcacacgttgtaagcggcaagcaaagccttgtactccccgaacgactggaagcggtagccgtaacaagccgctttcacggtattgccgatttggtgcttcacgtccccggcggcatagtccacctttttaagttccagacgttcggcacgttccttccgctctgccgggtacagtccgtatttcttttccagttcacgggtgatttgcttgctgcgccgatgctcgaacctgtcattcagcggtctgccgttctcgtccacccgcaaccccacgatgtggatatggtggcggtcgatgtcggtatgcttgtacaccaaataaggctggtcgccatagcccaacttccgcatatactcccgtgcgatgtcggaaagctgctggtcggtcagcacgtcttccgggtgcgggtttatggaaatatgaagtatcggcttcttggtggatagctggacgggcatctgcatttcaaagctgcgcatacactcgccgatagagaaattcccgtcctcgctcaacagcatccggttggagaaaagcacctttgcttccccgctgtccaccttgttttggttgtaagccagtgcgccgaacatattgccgcccgtgcttattttggcaaccatagttccttgcactcgtttgtcaggtcgataacctgacggttcaacacagccagttcggtggtcgctttctccagtttatagagaaaagccagtgcctttttctccgaaaagttgctgtgcaacgcctttacgacttggttgtaattgaccgctactgctctgaattgggcgtaaaattcggtcagccgggcgcaatactcgaccgccgatttgtccactttcaccacccggaacggctcgccgaacaaccgggcggcgatgaaacgggacttgctcgtgacgcccgactgctcccattgcgagaggaagcgggcgttctcccggtcgttcaggtaaaggacatggcgatgcttcgccgggtctgcgagggcggggcgaccgcccttgttaggttttcttgtttccatgcttctttggattaaaaaattacgacttcggagtgatttttaccccgcaaggggcaaggcgttttcaggcacggaaaacggttttgtagcatacaaaacacaccttgctattttctgacgaaaatcgaaatccgtcacggacggattggggttagcgtgaaacggtaagcccagccattcaccagtcctgttttacacctgcgccccttgcggttcgttactccgctgcaaagtaacggtgatttataatgctgtaaaataggcggttggtggacaaaacgggacagcgcaggacaaatcgggacaaggttttcaggggacgttttttcttcctttttttgcatcggatttcaagattgaaagcaagattgaaagaaatattccaatcaggaaagagtgattgaaagcatgatttcaagaaaacatgattgcaggatttcaatatttcaagaaagaatgaaagctggaaaacaagattgaaataaaacagtctttcaatctttcaagattgcaatatggaatgaatgattgaaagcaataaacaaatctatcaaccaataatgaacggaagcaatatggaaaacgagaaaacacccctttatgtcgccttttccacccaaaagggcggggtcggcaaaaccacctttaccgtgctggcggcgagttacctctactacctcaaaggctacgatgtggcggtggtcgattgcgactacccgcaacactccattgccgggatgcgaaagcgggatgccgagcaggtcggggcggatgaagattacaagcgaatggcgtatgaacagttcacccgactggggaagaaagcctacccggtattgtgcagttcacctgaaaaggcgattgcaacggctgacgaacatatagccgccggacacgtgccggatatagtgtttttcgacctgcccggcacggtgaacagcgagggcgtgataaactcccttgcgggcatggactacattttcacccccatttcagccgacaaggtggtgctggaaagcagcctgtcgttcgcaatggctatccaaaagctattggtgaggaatgaagcctgccgacttgccgggctgtacctcttttggaacatggtggacggtagggagaaaacagacctttacaccgcctacaacaagaccattaaggaactggaactgccgctgatgaaaacctttatccccgataccaaacgctacaaaaaggaactggtggcggataaaaaggcggtgttccgctccacgctctttcccgccagccgcccgctggtaaggggaagcaacttggaagaactgataaccgaaatagtgtactacatcaaattaaaatgatatggcaaagcaaagcggcgggatgccgaagatagacgaggatttcatgaaagagcttatctcgcagggtgttcccagtaaacaagataataataagacgaatgatgtaccgcaagaaacacaaacagaaacggtgcaagtagagaaaccgacaccccgcaagcgcaagggcggttcgggcgactaccgggaaacctactttcagaaagtggaactggcagaccgacagcccttatacgtgagccgtaccacgcacgagaagctgatgcgtatcgtgacagtgataggcgggcgcaaggtgacggtaagcagctacgtggaaaacattctgctgcgccacttcgagcagtaccaagacgagataaacaccctgtacgaaagccacttccaaaagcctgtctgactatgataatctattgcatacttaccgggcttttggtgtactatatagccctatggctgtggtatcgctacacggacagccggacatcaccgggcagaacggatgatgcgccactcccacgaaacggggtttcaggctacacgctgataggtgaaagccgatacaagggcggactaatcgggacagcgcaggacaaatcgggacacctcccgcaagcggctgaaaatgatactatttttgcgccgcaggctgacggacagccggaagaaaacatttcggcagcagcagccgaagcggaagaaacgcccggttacgagaatgacgaacccgactacgaggacgaggaaatagccgggtacatggacggtgacgatgataccgggcgggctacgggcgtgagcttcgatgaactggacgaagcagtacgcacggcgaacgccgacaaccccaccgaagcggagaaacggcaagccgccgggacactggcaagcattgagggaacgaacctctacgatgcggtggtggagaacatcaacggcgggctggcaaaggtggcggaactgctgggacgcaacgaagcggaactggctgcggctgctgtccctgccggaactggcgatacaagcgaggaacacgaagcgttcgacatgaacgatttcctataatataataatgtataagcctgacagcatgaaacaacgggattacggttgattggcaacctgaaaaccaaacagacaaacgggactatccccgaccactaaaatttcaaattattcaccagccgggaaaggcggactatccacccgccgcccggcattaaaaacaaatcacaatgagaaagaaaatcttcttgtcggcggctatacttgccgccgtggtaagtgcctacgcacaaggaaacgggcaggcgggcatcaccgaagccacgaacctaatcaccgggtattttgaccccggaacaaaactggtgtacgcaatcggggcggtctgcggcttgattggcggggtaaaagtatataacaagttttcaagcggcgaccccgacacctcaaagaccgccgccagttggttcggggcgtgcatcttcctgattgtcgccgccactatcctacgttcgttcttcctctaaaaaggcggcaatgtctgaatatccggtaaacaggggtatcgggaagccggtggagttcaaggggctgaaaagccagtacctctttatcttttgcggcggcttgctcgctgtcttcgtggtgttcatcgtcctgttcatggcaggcgtgaaccagtggctatgtatcggtttcatcgtgtcggcttcgctgctgctcgtgtggcagacgttccggctcaatgccaagtacggcacgcacgggctgatgaaagctgccgcacgcaaaagacacccacgcttcattatcagccgaaaggcgataccccggctgttcaactacaaaagaagaaaggaagaaagaacatgaggaatatgttaaaggctaccacgctggaaaggaaatttccacttttggcggtggagaacggttgcatcatttcaaaggatgcggacataacggtggctttcagggtggaactgcccgaactgttcaccgtcaccagtgccgagtacgaagccatacattcggcatggtataaggcaatcaaggtgctgcccgactactccatagtacacaagcaggacttcttcatcaaggagaactaccagcccgacacggaaagggacgagcttagttttttaagccgctcctttgaacggcacttcaatgaacgcccgttcctgaaccattactgctacctgttcctgacgaaaacgacaagggagagaagccgccgacagagcgacttctccaccctttgccggggaaggattgttccgcaggagatagccgacaaggaagcggcggcaaagttcatcgaagcggtcgagcagtttgaaaggattatgaacgacagcggttttgtcacccttacccggctggcggcatcggaaatcaccgggcaggacggaaaggcgggcatcatcgagaaatacttctcgctctcgcagacagataccacctgcctgaaagacatcgggctgtacccggaagaaatgcgggtcggggacgatatactgtgcctgcacacgctttcggacgtggaagatttgcccggaaaggtcgggacggactgccgatttgagaagctgtccacagacagaagcgattgcaggttaagttttgccgccccggtgggcgtgctgttgtcgtgtaaccacgtctataaccagttcatcttcatagacgaccacgccgaaaacctgaagaacttcgagcagaccgcccggaacatgcaatcgctctcccgctactcccgtgccaaccaagtgaacaaggagtggatagacgagtacctgaacgaagcgcacagcaaggggcttatttcggtacgctgccactgcaacgtcatggcatggagtgacgatagggacgaactcaaacgcatacgcaacgatgtgggaagccagcttgcgctaatggagtgcaagccacgccacaacacggtcgatacgcccacgctcttttgggcgggcatacccggcaacgaggcggacttccccgcagaggaaagtttctacacgttcttggggcaggctctctgcctgttcgtggaagaaacgaactacaagagttcgctttcgccgttcggcatcaaaatggtggacagggtaagcggtcgcccgctgcacatcgacatatcggatttgcccatgaagaaaggcatcacgaccaacagaaacaagttcatacttgggccgagcgggtcgggtaagtccttctttaccaaccacatggtgcgccagtattacgagcagggtgcgcacgtgctgctggtcgatacgggtaacagttacttggggctgtcccagcttatccacaaccgcacgcacggcgaggacgggatttatttcacctacaccaacgagaacccgatagcgttcaacccgttctatgtcgaggacggggtatttgacatcgagaaaaaagagagcatcaagaccctgatactcaccctgtggaagcgggatgatgaagcccccaaacggtcggaagaagtggcgttgtcaaacgccgtgagtgcctatatcgaactgataggcaaagaccgttcggtaacgccctgcttcaacacgttctacgagtttgtccgggatgattaccgccgacagcttgaacagaagaacgtcagggaaaaggattttgacattgacaatttcctgaacgtgcttgaaccgtactatcgtggcggtgagtacgactacctgctgaactccgacaaggagctggatttgctgcataaacgcttcattgtctttgaattggacaatatcaaagaccacaagattttattcccggtaacgactatcatcatcatggaagcctttataaacaaaatgcgcaagttaaaggggataaggaagttaatactaattgaagaagcgtggaaagcgattgcatcggcgaacatggcggactacataaaatatttgtacaagactgtccgaaagtatttcggggaagcgattgtagtcacgcaagaggtagaggatattatttcttcccctatcgtgaaagaaagtatcatcaataactcggactgcaaaatattgttagaccagcgaaaatacctgaacaagttcgacagcatacagaacctcttgggactgaccgacaaggagcgttcgcagatattgtctatcaacatggcgaaccaccccggacggaagtacaaggaagttttcttctcgctgggcggcacacaatcggcggtgtacgccacggaagtttcattggaagaatattacacgtacacgaccgaggaaagcgaaaaaatggaactgttcgcccttgccgagaagctggacggcaaccttgaactggctatcaagcggcttgcagaaagcaaaagaaatccccaatcatcaacaacttaagaattaggaacatgaaatggattgacaatctgatatacacgctattgtccgcctgcctgctggcgggctgcgaggacagcggaagcaaggagctggaaaggatgcagggctattgggtacacgtcaggggacacccggctttcacactctcggaaacgggcggcagatacaccgtcacccggaaagcgaatgtcaggggcagaatactggaaacggcttacccggtaacagaacggaacggctgcctgttcatcgaaacgggcttccgcatacagttcacctatgacaaaaagaccgaccggataacgctcatgcccggcggcgaatacaaacgagttacaaaccctgaaaacaaaagataatgaaaagaacaattctccttatggcggtgtgcctttgcttcatcggcaaggcatccgcacagtgggtggtgtcagaccccggcaacttggcgcagggcatcatcaacaccaccaagcagatagtgcagacttccaccactgccaagaacacgctggacggcttcatggaagcgcagaagattttccagcagggtaaaaaatattacgatgcgctcaaagcggtacacgatgttgtcaagggcggcatcaaggtgaagaagtccattgagctggtggcggaaatatccgaaatctacgtgcgaaactatcagaacatgctggcagacccgaactacacgccggatgaactcaccgccatttcagccgggtacgcaaagctgctctccgaaagtgcggacgtgttgcaggacttgaagaatgtagtgaacgtgacgggcatgtcgctgacggatgccgaaagactggcggtaatcaacaacgcctataaaagcctgctcaactaccgcaacctcgtgaactactacacccgaaagaacatatccgtgtcctacctgcgggcgaagaagaagaacgacaccgaccgggtgctggctctctacggctcggcggatgaacgctactggtaacatataaatcggtatgcctatgttattagcagcggtggattttgataacctgcaccaagtgttgcgggtgctgtacgatgaaatgatgcccttgtgcagcaacatgacgggggtagccaaagggatagccgggctgggagctttgttctatgtagccgccaaagtgtggcagtcgctcgcacgtgccgaacccatagacgtgtacccgctcctgcgtccctttgcgctggggctgtgcatcatgttctttcccacgttcgtgctgggcactatcaacacggtattgtcgccagtggtaaaagggtgcaaccagcttatggaaacgcagactttcgacatgaacgagtaccgggcgcagaaagaccgactggaatatgaagccctgatgcgaagccccgaaacggcttacctcgcatcggacgaggaatttgaccgacaactggaagaactgggctggtcgccctccgacatggtgaccatgacgggcatgtacatggacaggacggcttataatataaagaagtccgtccgggactggttcagggagttattggaaatgctctttcaggcggcggggctgattatagacacgctgcgcacgttcttcctaatcgtgttaagcatactgggtccgctggcgtttgcgatttccgtctatgacggtttccaaagcacgctgacccggtggatttcacgctatatctccatttacctgtggctgcccgtgtcggacttgttcagcagcgtgctggcacgcatacaaaccctgatgctccaaaaagacatcgagcagctttcagacccggatttcatcccggacgggagcagcaccgtgtatataatctttatgattatcggcatcgtgggctacttcaccattccaacggtggcaagctggatagtgtcggctggcggtacgtctgcctataaccgcaacgtggcacgggctggttcaatcgccggggctacggtcggtgcggcaagcgggaaagtaaccgggaaactactcaaataaccaacatcaatatttagtatatggaatttaagtcattaacgaacatcgaaacgagtttccggcaaatccggctctttgcgctggtattcatctgcctgtgcgcactggtgacgggctttgccgtgtggaactcgtacagcttcgccgaaaagcagcggcagaagatatacgttctcgacaacggcaaaagcctgatgctggcactctcgcaggacatggcgcagaacagacccgtggaagcgaagtcgcacgtgcggcgtttccacgaacttttcttcaccttatcacccgaaaagggggctatcgaaagcaacatcaaacgctcgttgtttctcgccgacaagaccgctttcaactattacaaggacttggcggaaaagggctactacaaccgggtgatttccggaaacgtcacgcagacggtggagattgacagcgtgaagtgcgacttcgaccagtacccctacaaggtgaacacgtatgcccgccagttgattgtccgggaaagcagcctgacagtgcgaagccttgtgacctcgtgccggttgcttaacgccacacgaagcgacaacaacccgcacggcttcatcatcgaagcgttcaccattaccgagaacaaggatttgcagaccattaaaagatagccttatggagagaaaacgaaaccacatcgaaaaggtgcgggactgggcggacgaccgcctgcgccgaatgtgcggacggattacgccgggcaaaaggctggcggttatcctcctgatgttcttctttttcggcggcttgtctatctacatcaccgtttcatcaatctacaatatcgggaaacgggacgggcaaaggctgcaaatagaacacatcagacaactgccgttgcacggcaatgacacaacccaaagtatcaacccgttaaacagaccgcaatatggaagaagtacagaagaatgagaacggcacgaccgcacagcaggcggacgggaagccgaaaaaggaaaataagcccaaacgggaacttaccccgcagcaggtgcagcagcgcaggaaaatgatagtcttcccgctgatgttccttgcctttgcagggtgcatgtacctgatattcgcaccctccggcaaagaggacgtgaatgtggaaagcgtgggcggcttcaatgccgacatacccctgcccgcagaggacgggattatagccgacaagcaaaaggcttacgagcaggcggtgacaaaccgcaaacagcaggacaagatacaatccttgcaggacttcggtttcacgctggatgatgatacggaagaaccacaagaggaaatcaacctgctgccggaagaagatccgaagccacaaaggggcggcggtgcttcttcaagggcggcttaccgggacatcaaccgccagttaagcacgttctacgaaacgccccctgtggacgaggaaaaagaggaattgaaacggcaggtggcggaactgaccgaccgactgaaacagcagcagaacgccacgcctacggctgacgaccaaatggcactcttggaaaagtcctacgagctggcggcaaagtacatgaacgggcaggacggacaaagggggcagattgcccaaataccgacagccgggcagaacggtggcggtatcggcactccggctattccggtgcaggctatccgggaaacgaccgtttcgggattgcagcagcccatgagcgatgccgacttcatccgggcttacagccagccacgaaactacggcttcaacacggcggtaggcacggggtacgctatgggaaagaacacggtagccgcctgcatacaccaagaccaaacgctggtggacgggcaggcggtgaaactgcggctgctcgaacccatgcaggcgggaaatatcgttgtgccgaagaatacccttgtggcggggacggcaaaggtgcagggcgaacggctcgacatactggtgtcctcgattgagtacgctggcaacatcatcccggtggaactcgccgtgttcgacacggacgggcaaaaggggctttccgtaccgtcctctatggagcaggaagcgttcaacgaagctatggcgaatatcggaagcgggctgggtacaagcatttcctttgcccaaagtgccgggcagcaggtggctatggacgtgacaaggggattgctgcaaggaacgtccggctacctcgccaagaagttccgaaccgtgaaagtgaagctgaaagcaggctataaagtcatgctgtatgccaaacaacaataaccattttatcaaccgttaaaatttcaattagcaatgaaacagatttttggattgttcgccctcttgctgggcgtgtgtgcggcaaacgcacaaaccgctgacaccgtgaagtatgcggctggcaacgacttgtaccgggggattacccggaaactcccgtaccgccaaatggttacgccctacggcgtggaagtgacctttgccaagacggtgcatatcatcttccccgccgccgtccgctatgtcgatttgggaagcaaccacatcatagcgggcaaggcggacggtgcggagaacgtaatcagggtgaaagccacgacagagggctttccgggagaaacgaacttctccgttatctgcgaggacggcagtttcttttcgttcaacgccaagtacgcccgtgaaccggaaatgctcaacatcgaaatgaaggacttcttggagaatgaagatacgtccgacttctcgcatacccggatgaacatccatttccgggaactggggaatgaaagcccgctgctggtgaagctgataatgcagagcatctacaagaacaatgaccggaaagtgcgccacttgggtagcaagcgtttcggcatacagttcttaatcaaggggatttacacctataacgggatgctctacgtgcacacgcagacaaagaacagttccaacgtgcctttcgacacggacttcatcaggtttaagataaccgataagaaagtgcccaaacgcacggctattcaggaaacggtactggatgcggtacgcagctacaacgaggtgatagagattgccgggaaatcgaccgtgcgcacggtgtacgccctgccgaagtttaccattcctgacgacaagctgctggtcgtggaactctacgagaagaacggcgggcggcatcagaccatacgggtggaaaacgccgacatcgtgaacgcagaagtgattgacgaactcaaaatcaaatagggaatgaaaagacacatctttataatgatgctctttgcgctgtgcctgacctcgtttcaggcacacgcacaaagatacctgccgggaatgaaaggcttgcaggtcacggcgggcatgacggacggggtgcattggaacgctggcagtgatttcgcctaccacatcggggcggcgtacagcgtttacaccaagaacgccaaccgctgggtgattggcggcgaatacctgcacaagaagtatgactacaaggatatgcagatacccgtagaacagttcaccgcagagggcggctattacctgaaattcctatcggacagacgaaagacctttttcctttcattgggcttgtcggctctcgccgggtacgaaacaagcaaccgaagcgaaaagctgctgccggacggctctaccttgctggataaggactgcttcatttacggcggtgcgctgacgctggaactggaaacctacctgaccgaccgggtggctctgctgttgagcgcaagggaacgggcgttgttcggctcggacataggcaagttccacacgcaggtatctttgggactgaaattcattatcaactgaccgctatataataatgtatatgaagaatgtaatgtataaaatcatcatgggctgctacatcgtggccgccctcgtgcttgtcaccgcctgtaatgacaacttggatattcagcaggcgtacccgttcagcatcgaaacactgccagtacccaaaaggctgaaagtcggggaaaccgccgaaatacgctgccgactggtgcgtggcggctattaccagccgactacctatcagatacggtatttccagccggacggcaaaggaaagctggaaatggataacggcacggtgttcctgcccaacgacctttacccgctggagaaagaaacgttcaggctctactacacctcggcatcgaccgaccagcagacgattgacatttatatcatcgacagcttcgggcagatgcagcaacttacactatcattcaataatgacaacagcgaagaaggaacggaaacaataaccccctaataacaaaacgacatggtaaaaatagaattggatatagaaggcatctcgtggtacatagaaaccacgttggaaacagatacagttccggcagtaggtgacatcatcattgtggacaaggactgtatttccgaacgtgacagtgctgaattatggaaaacgccgtccaatcaggttttcaaatgggcggacgaagaagatgatgcgcccgtaatggtatggttcgattgcgaaacggaaatgcttgtcactaagcggacatggaaatatgacatcgaggaagaagaaaccgtgtgcatacttggtgtaaaatttattcactatgaggatttatagttgcgacatccgtttttatcatcctcttgggaaaccgggtatggaatgatacgcaaagcgtaaatatcgggcagacagcccgccgggaagcatcggcgggctgtttccatgatagggaaaacgaaaggcttctttgttactttcttcacccgctggcaggctcacggaagaaagtaacggcggcaagcagccgccgtcctctatcaactggttttaaggctctttatggacgtgtatttctctaaccacacctttacctgctccatgttatattcgcccgtgatgattgccgtatggtcgtctatggctacaaaccggacactttcatagctgtttacccagccttgcagggaacagacgccccacgtgtccacatcttcaaaaacactgcggtctatccggctgattggctcgccgaaaactaccgtcattatctgaaagtccggtttgtcctccaacagttgcaaatggtgcagcgtgccgaactcgtctattttgcgcccccacgcccacacatcattatacaaatcatcgccccactggtgcgggtggtcgaaacggacttttacctctatggtgtgttcgttttcttctgtgtcctcgataacgcccgttaccattaagcccgtaaaaatgcactcgcaacgcctgccgataagctccttgtttacttctgtcgttttcatgtccctgaaatttacttgtttattactccgttcttcttcgctacccattcgtcacgcctgcggcggcactcgtccagcgttttggctaccgtgctgaaaagttcgccgtccgtgtggcggtagtcatattgataataaatctgtcccctgaaagcccctaaacggcatttcacgaacttttcttctcccggtgtttgggtgatgcttaccccgtttttgttaagtgactgcatgatgtcttatttttttatggttataaacttggttgttttaagcgggcagggctttgacaccccgcccggattggttgttatgccgcccggaacacaaagccgtcatcaaaccagtaatcgcacatgaacaggtcacgggcaaactgtttgtaatcgaaataggtctttgcgaactccggcaggtcgtaacattcctctacaatttcataggcgaaatcttcttcatcgtcatattccccttgatattcatcccggaaatcacgtacaaggtcgtccgcatcttcctcgcccaaatcatggcttttatagttgcaccacacgaaaaaggcttcctgctcggtgtcgctcaaatcctccaccgcatcacgcagggcgaagaagttttcagaaatccagctttcgtcgattaagccctccggcacgttctcccagtcctgaaacatgtattccgcatcttcctcgtccttgtgaagttcccggcaggcttcataaaattcttccttgtccgaatagtccgaaaggtcgagccatgcgccggacaatgaaccgttgttgtacttggcataagtgcctacataaacttttgcttccgataatacctttgcttccatattgctgtaatttttaagtttttaattttatgcggatttgagaggtgagggagttgaagtttcactgaacttttttcctgtttcccgtaaatccgactttttttttatgcgtcttccggtcgggtcggtcgttttcgtttcacataggcgtaaaagggtagtgtttagagtttgcaaggttttgggcaaaaaatacctcgcaaggcaggagggcactgaaaaagtcccccatatagtagcgtcctaaaaaaatcggcacatattcaggcaaaagcttgagtatgtgccgatttttttgtaactttatggtagtaatcagacagatatgctaccactacaacagactatacagttcagtaattattcggatctatacgatttgattattcctcgtaacaacctattgcgtcagataaatgatttgatagacttttcttttattaaaaaagaactcgttgacaagtattgtcaagacaatggaaggatggccgaatgtcccatccggatgttcaaatatcttctgttgaaaacaatctatgacatatccgatgtcgatgttgtggaacgatcaagatatgatatgtctttcaaatactttcttgggatgagtccggaggaaacagatttgattaatccgagctcattatgcaagtttcgcaagttgcgtctaaaagataaagatctactggatttgctgattggcaagactgttggcatagctatagaaaagggcataataaagtctcgcacgattatagttgatgccacccataccggctcacgcagcaatccttggtcacccttggagagtctaagattgcgctcgaagcaattgcgcaaaagcatatatgatgccgacgagaccgaaaagagcaatctgccttcgaagaacacggatgacaacattgagcatgagcttgactatacaaaggcattgcttgatgtagttagctcaaatccctcattggcagagatacccaaggtcaaagagcggctgaatatgctcaaggaggtacttgccgatattgaagaccattatatgacatcaaaagatgaagatgcacgggtgggtcacaagagcgaggatgactcgtttttcggctacaagacacatattgccatgagcgatgagcgtataatcactgccgccacagtgacttcgggagagaagggtgatggcccacaacttgaagagctggtaaaccagagccgtgccaacggaatgacggtggaaacagtcgttggagacacagcttattcaggtaaagacaacatcatattatcgaacaatgaagagaatggttttgagctagttgcaagattaaatccagccataagcaatggattccgtaaggatgaggataaatttgatttcaataaagacgctggcatgtttgtttgcccggctggccatatggcaattaggcgcgctgtacaaggaaagaaaggacagggaacgaatcagtcaatggtctatttctttgatgtagataaatgcaagttatgttcaaggcgagagggatgctacaaagaaggcgcaaaatctaaaacatattctgttcaaataaaatcatcagagcatcagcagcatgaggcgtttgagaaatcggaagagttcaggagtaaagcaaaagtgagatataagatagaggccaagaactccgaattaaaaaatgtattagggtatgaccgagcatggtcatacggaatagaatgtatgcgtatgcaaggggctatggttatctttgtagcaaatatcaagagaatcctcaaactcagatgaggggagagccttttcgttctctaaaaagcccttaattggccgtttttaagctttacagggcaagtaaccgctaaattcttagattcaaaagtagaaaaataagttcgccaaatccaattatatggacttggcgaacctttcattttattgcctttagagagcctttttcagtgccctccaaggcagggaagattttttcgccaaaccggaacggctcgaccttgcaaaatcgtgaagaacacgtaactacctttgcctattgaaatgattaaaacgactgtcccggctgggggactgcgtaagaggaagatttacagatagggaaaccggggaaaagtgcctgttctctttcatcttttagggaacactccatgcgggcaggaaaggcaagggtgttgtgagcttgcttgcaatacgcttgtgcgggtttccaacggctcttttcacggaatacagtcagccatgccacgcacggctggcgtttcggggaatgtgccagttggaaaaggatataaaaaatgcgggtagtcggtggactgcccgcaaggtggaagaatgtacttcattgggatatagtttgttaggcggaatttcgttaccgaaatcgttacctattcgtttttgtcacggttataggtaacgaaacctaccggacggcgttctttctgttgtttcgactggctcaaaagctgggtaagggcttggtacagttcgttgaactgcgcatcggtgcttacctccagttcctcgatgcgccttgacagttcctcgtaaccgattgccatttggcgcatgaggacaaaagcccgcatgattgaaatgtttacttctatggctactttggagcggagaaccgaagaaagcatggctacgccctgctcggtgaaagccataggcatagcaacgccgaagttgtaatcaaggggtatcacattttgtgatacccctatggataacagcaagttagcttcctcttgggtgagtacaaacataaaatcacccggaaaacgctcgatattgcgcttgaccgcctgcttcaaggctcgtgtttccacttggtagagttctgccaaatgataatcgagcatcacccggcaacctctgacctcaaaaatcttgttttggataatctgcaaatccataatcgtatattttaggagatttagcaatgttggaataatagcaaggactggtcacaaattgtgaccagttcccaataatcaagattacatggcgacttccttgtaaatcttctcgatgccgacaaacttcttgtcaagcccctgcatatcgctgcctatcttgctgttggtgatgcgggcgtaaatttgcgtagtttctatgtttgtgtgtcccagcatcttggacaccgtttcaatgggtacgccctttgacagcgtggtggtcgtggcgaacgtgtgccgggcaaggtggaatgtcaggttctttttaataccgcatatatcggcaatctctttcaagtaggcgtttagcttctgattgctgattacgggaagtatcttcccgtccggcaacttgcccttgtacttcttcaaaatcatcttgggaatatccagcagggggacattcacgtccgtgttggtctttacccgcttggtgattatccaaaggttgccgtcaaaggacttttggatattctcctgccgcaagttggcgacatcgctgtatgccaaaccgcagaaacaggaaaagacgaacaagtccctgacgtgttccagccgttcggaaaccattttctttttaaggatgatttttatctcgtcctctgtcagataacccctgtccactttctccagccggattttgtagctggcgaacgggtcgcccaccagtatgccattgttacgggcaatgatgatgatacgcttgaagaactgcatgaacttggcggtggtgttatagccgcacttgcaggcggtacgcaaatacaactcaaaatcggtaatgaacatcgggcttatctcctttatggatatgtccgatacattgtacttgctttggataaattcagcgaggtggcggcgggtcacttcatacttgcggtaggtcgctatcgtcttggatatacccacaagctgcttcacatcgtcattgtgcttttggaacaatgaaaggattgtttcgtggctctcgctatgacctaaaaactcgtttttcactttctcggcggtcacgtagttgtcacgccgttgcatttcgtggtaaatggtattcagggaagaacgtatgtcgtccaaaagggcgtttatcctcccggcatccctgcctttggctttgcccgcagcaatgctccagttgtcgggctggatgctctgtttcgtactgaactggcaaagtttgccgtctatggtgatgcgtgccataatcataacctcgccgtttttcttttcagaacctttcttcaaataaaaaagaaccttgaatgtcgatttcataactcaaaatttttagttgcaaaattagtttttacctctcgttttcgagttatgcagactatggactaatatagtcattatcaggtcatttatggacaattcgttaccgtttttgtccggcagggaataggtaacgatttagtaacgaaactttgtcttttaccgtacttttgaagtcttgaaagcaggactttcgggcaataaaaaaagccacaaatcattgatttgtagctttttgtccgtttgctgaccatttctgtccagcacgttcagcggagagacaggctctcgaacctatacattcaagaaatatcataaaattgcaaattactgataatcacacacaatttggaatacatagtaaatctaaatctttctgaatatcttttgctattccaaatattgggtgtatatttgggtgtagaatttcaaacgcacccaattatgaatatcaaacgaaacatcatttttgcattggaaagccggaaaaagaacggtgtgccaattgtggagaatgtccccatccgtatgcgcgtcatatacgcaagccagcgcattgagtttacaacgggttaccgcatcgatgtagccaaatgggattccgacaagcagcgagtaaagaacgggtgtaccaacaaattaaagcaaagtgcatctgaaatcaatgccgatctgctgaaatactatgccgaaattcaaaatgtgttcaaggagtttgaggtacaggaaaccatgccaactacccaacaactaaaggatgcattcaacctgcggatgaagaatgccaacgaagaacagcaggaagaagcacagataagtttttgggaggtgttcgatgaatttgtaaaagaatgcggcaatcagaataactggactgaatccacatacgaaaagtttgcagccgttaaaaatcacctcaaggagttcaaggaagatgtgacctttgaatatttcgatgagttcggattgaacgagtatatcaatttcctgcgtgacaaaaaagacatgagaaacagtaccatcggtaaacaaatgggattcctcaaatggttcctgcgatggagcttcaagaaagactatcaccagaatatagcatacgatacgttcaaaccgaaattgaaaaccacccccaagaaggtaatcttcctgacatgggaagagttgaacagactaaaagactatcagatacccaaagacaaacagtatctggaacgtgtccgggatgttttcctgttctgttgctttaccagtctgcgttattcagatgttcgtaacctaaagagaagtgatgtcaagtccgaccatatagaagtcaccaccgttaaaacggcagatagtctgagtattgaactgaacaagtacagtaaagccatacttgaaaaatacaaggacatccattttgaaaaccacatggcattgcctgttatcagcaatcagaaaatgaatgattatctgaaagaactgggagaactggcagaaattaacgaacctatacgtgaaacctactacaaaggaaatgaacgtatagatgaagttacaccgaaatacgcattactcagcacacatgcaggaagaaggacattcatctgtaatgcactggctctcggtattcctgcacaggttgtaatgaaatggacagggcacagtgattataaagccatgaagccttacattgacatagcagacgatattaaggccaatgcaatgaacaagtttaaccaactctaaaagtatcagtcagtttcacagattatccattattagagttatctttgttaagtaatagttagtgatatggaaaataacaacgaacataatataaagaaaggtcattttgatgcctttgtccatgctgtcggttcggaaatagaacaggcacaagtccgactcattaccgcagccaatgcccagatgttgttccattactggaaaatggggaattatatactgtaccaccaacacctacatgggtggggtggtaaaattatcaaaaaattggcacaggcaatcagattcaattatcctgaaaagaagggatattcggaacgtaatcttacttatatgtgccagtttgcccgtttatatccgttaaatgtacttcgtagttttattgaagcagattcaatactgtcggtcccaaatattcaaaacattactaatgaagtccttaagctcaatagcggacaatttacgcaggagcttactgcgcaaatacaatcagctgataatcaatctttagaaattacgcaggaggttcctgcgcaatttcagaatgtagcaaaaacagtagcaaccatctataaaataaaaatagaggatatagaagatttattcttggcgtcaccgattgcaagaataaattgggcaagccatatggtcatactcaataatccgctaccattgggcgtaaggtattggtatatgaaacaatctgtagaaatgggttggagcagtaatgtgctgaaaatgcagattgaaagtaatctgtatgacagacaaatcaagagtaacaaggtaaacaacttcactgccacacttccggcacctcaaagcgatcttgccaattatctgttaaaagacccgtatatctttgacttggcaggagcaaaggaaaaggctgacgaaagggatatagaagaacagttggtaaagcatgtaacccgttacttgctggaaatgggtaacggctttgcttttgttgccagacaaaaacatttccagattggggacagtgactttttcgccgacctgatcctatataatatcaagctccatgcctatgttgtcgtggaattgaaagcaacgccattcaaaccggaatatgcagggcagttaaatttctatatcaatgttgtagatgataaactgaggggagaaaatgataacaagaccatcggtcttttgctgtgcaggggtaaggatgaggtcgtggcacaatatgccttggctggatatgaccagccgataggtatcagcgactatcaattgagcaaggcagtacccgaaaatctgaaatctgccctaccgagtatagaagaagtggaagaagaactgaccttattccttgacaaggacaagaacccataatataaagtatatggcaggaaagatacagacgatgattccccaatatggagaactcaacagaatatacagagactatatagataattacgctttttcttttgacaggcagaaattcatatcggatttctatcaggagtataatgacatgaaatcctttgaagccgctatccttgaactggtgcttgacaagcaaaaagagcaatacaccttgatactcaacagcctgaaaactgaaatagaaaagagcatacaggcttatgagatacgcccgttaagtgacagagccatagaacgtgcttgctatcagcacatggaaaggtattctcaggaaattgaagcccagctggatgttacaagaagtctgagcaagccgctgaatgaagccaacaacaggtatgattccattggttacagggagcatacagccgaagaggaaaaacaggcagagaaagaatatgaacgctgcaaggctgaatatgacagggaaaaagccaaactgaacaaactctatgatcagcaaaaggctgcaagaacagaggcattccaatacatgaagaactgttgtgcggacatataccgtcaaagctgcctttttctggatatattgaagaaatacattcctgacggaaagcaagagaataaatcaagcgagccaatcagtcagcaggaaacgacagaagaacaacaggaatatttcagcatgaaattactttcgctcattcatgaggtgtgcataggagaacagttcgaagaaatttccgcactggatttctatgccaatatgaatcttcacccctgcaactgtaagctgaaaataaaaccgagagagaaaatacgtgtatgctatctgatattcctgatgagcgagaaactctccaaacaggacagggacaaatggaaagacagaatactgaaactgctggatattgacgacagctactacaaatccaagtacaaggagcctgtttcagatttccccagtgacagcaaccaaaatttcgccaaggaaatggaacatatattcagataatccgtaatatatcctgatactttacgaaagttccacttttaccactcaaaataatttttgagtggtatttttattttctgatattcaataagatacaatgatattcagtttgtaccgtccccatccttaccactcataaccctacctaattttgcatcgttcgagaacagaaataacagccagtgcgcagggctgattgtttaacgactaaatagattggacgatgacaaatatccaagaattattatcaaaacccgtctggcagatgacaggcgaagaattcatattcctgagtaagcacgcttcaggtcaggccgaagcattgccgcaacccgttacagacacggaaaagaagtatgtgtacggaatactcggtatagccaaactgttcgggtgcagtctgcccactgccaaccgcataaagaaaagcggtaagatagacaaggcgattacccagatagggcgcaagattatcgtagatgcggaattggctcttgagcttgccgggaagaaaacaggaggacggaaataatgggaggtatgcttatggactatatgaaagaaataaaggagatttcggcagaacaggcaataatcctttggcaagcttcacgcctgagtctgtcgaaaatctacgaaaaagcacctgagattctaaaagtgcaaggttcggtcattggtacactgggcaatttcagtgcatccatcggcaaagccaagagtaaaaagactttcaatgtatcggctatcgtagccgccgcattgaaaaacggtacggtactgcggtatgttgcggaactaccggaagaaaaaaggaagattctttatgtggacacggaacaaagccattatcactgtctgaaagtcatgaaacgtattttacggcttgctggtcttcctgatgacagggacaatgaacatctggagtttctcgctttgaggaaatacacgcccgaacagcgtatcaggattgtcgaacaggctatctataatacaccggacatagggcttgtaatcatagacggcatccgtgatatggtatatgacatcaacagtccgggagaatcgacacgcattatatccaaactgatgcagtggacggatgacaggcagatacacatccatacgatactccaccagaacaaaggcgatgaaaacgcaagagggcatatcggtacggagctgaacaacaaggcggaaaccgttctgctggtggaaaaggacaagagcaacggggatataagcaatgtttcagccatgcacatccgtgcaatggatttcgagcctttcgctttccgtatcaacgacaatgcattgcctgaactcatagaggggtacagacccgaagcgaagaaacccggaagaccggaagaggaaaagtttgacccttacagacatattagcgaacagcagcaccgcatagcactggaagcggctttcggactgaaagaggaatacggctacaaggatctggaaacctccttaatcaagtcatatatgtcggtaggtgtaaaactgaaccatcaaaaagcggtatcacttatcaccatgctccggaacaaacggatgatagtacaggagaacggcaggaaatacacgttcaagccggactttcactattagaccgtataacctgtaatcacttcactttattcggcaggtctatatattaagaataaagcgaagcggttgtagggaatagaaaagcgcttcactttattaccgtatcctatatatacgaagataaagtgaagtgattatacagaccgtacttcataaaaaagtacgggcgaaaagagaaataaatattccaaccattattcaaacactcatcttattatggatatacagacagcaaaacaaatcaggatagcggattttctgtacagtttgggatattctcccgtcaagcagcaaggtattaacctatggtacaaatccccgttacgggaagagacagaaccctcgttcaaagtaaataccgagcgcaaccaatggtatgatttcgcaatcggcaaaggtggaaatatcatcgcactggcacaggaactctactgttccgactatgtgccttatcttctacagaaaatcgaagaacagataccacacatacgtcccgtgtctttctcttttggcaagcaatcattttccgaaccgagttttcagcaattggacattgtgctgctggcttctcctgccctgcttgcctacctacaggaaagagggataaacacggcactggcgaaaagagaatgtaaggaagcccgtttcacccacaacggcaaacggtatttcgccattgcctttccgaacatatcaggcggatatgaaattcgcaaccgatatttcaagggatgtatcgcaccaaaagaaatatcccatatcagacagtcaggaaaaccaaggagtacatgttacgtttttgagggatttatggattacctttcctttcttactttaaggctggaaagctgtccgcaatcacccgacttcgacagacaggattacatagttcttaattccgtagccaatgttcccaaggcactctatccgttgggaagctatgagcgcatccactgtttctttgacaatgaccgtgcaggaatggaagcaatacagcaaatccgaaaggagtatgatgctacccggtatatacgtgacgcctcgcaaatctacagtggatgtaaagatctgaacgaatatttacagaaacgaatagccgataggaaagagcaagcgcaatctgtcgaaaagaggaatgatacgctatccaagaaaccgaaaggcttccggttatagcccactataactacacgcttcgctttcgtagttgtgggctctcccgaggggattagggctttgccctaatgacccactcagggcgtttcacccctgagaaccccgagcaaagagtgaccctctctttgcaatctccgcttatgggttacccctaagaacccctctgcgaaagcgagcaaagtaaatcaattgtaaacaaaggaaagaagctatggcaacaaaatcaagcatacatatcaagccttgcaacatcgcatcgagcgaggcacacaaccgaaggactgccgagtatatgcgtaatatcggggagtccagaatctatgtcgttcccgaactttccaccgataacgaacagtggataaatcccgacttcggcactcccgaactgcgaactcattatgacaatatcaagcaaatggtcaaggaaaagaccggacgtgccatgcaggaaaaggaaagggaacgcaagggaaagaatggaaagattatcaaggtggcgggatgctcacccatccgtgaaggagtattgcttatcagaccggacaccacactggctgatgtacgcaaattcggtgaagagtgccaaagacgctggggcatcactccgctacagattttcctgcataaagacgaagggcattggctgaacggtcagccggaagcagaagacaaggagagcttccaagtcggtaacagatggttcaaaccaaattatcatgctcatgtcgtattcgactggatgaaccatgaaactggaaagagccgaaagctcaatgacgaggatatggcaaccatgcagacccttgcttccgatattctcctgatggaacgtggacaggcaaaagctgtcacaggtaaagagcatctggaacgaaatgatttcatcattgagaagcagaaagccgaactgcaacgtatagaggaaaccaagcgacacaaggaacaacaagtaagccttgccgaacaggaactcaaacaggtaaaagcagagatacgcacggacaaactaaagaaaacagccaccaatgctgctaccgccatagcaagcggtgtaggttctcttttcggaagcggtaagctgaaagaactggaacatcacatcgagcagctacatcaggaaattaccaaacgggacaaagctactgatgaattaaaaattcagatacaacaaatacaggaacagcatagcagacaaattcgtaatcttcaaagaatacataatcaagaacttgaagccaaagacaaggaaatatcacgattgagcaccttgcttgaaaaagcccacaaatggtttcccatgttcaaagagatgttgagaatggaaaaattatgcgctgttatcgggtttaccaaagacatgatagaaaacctcttgacaaagaaagaatccatacaatgtagtggcaaaatttattccgaagaacacaggtggaaatttgacatcaagaatgatatttttagggttgagaaacatccgatggatagtggtaagcttatgctgatcataaaccgacaacccatagtacaatggtttaaggaacaatgggaaaagttacagcagaatctacgtaactcggtgcagagagagcaaaaatccagaggatttagaatatagaatagcctattattaataaaatcaagtatctatgcatccaaacagattgtttttattacagaatcaaaatcctaagaatttataaaaaatgaagcctaaagaagttttggaaaaatggatagattgctttaacaaagcagatgcttatcatatagcagagctgtatgctactaatgcagtaaatcatcaagtcgcaaacgaaccaataataggtaaagaatcaatctacaaaatgtttgtgaatgaatttgccactgctaaaatggtttgtatggtggaaaatatttttgaagatggcgaatgggctatcatggaatggaaagactctcttggacttcgtggatgcggattttttcatgtaaaagataacaaaatcgtctttcaaagagggtattgggataaactttcattcttgaagcaacacaatcttccaattgaataagtactatcagaatacggactgggaaattgaaatacccagtccgagttatataatgaattttacttgttaaactatttaaagtcagttggataacaaaccatacctttcacattctcagtagctccaggtattaattcagccaccatgcaatattcatgagagacttcgaaaggaaattcaattcctaaatcgatagccttgcgatagccaaatcgaggataatactctttatgccccaatacgactgctgtgccgtaacccaaaagtgctgccctctgatgggcttactgaatcaacatcccccccccaattcccttacgctggaattccggcaagactgccaatggagctacactcagggatgtgacagactgggtgtcactgtctatctttacttctgtaagtaagatataccagacaatttgtttttctgtcattttcttgttcttatctaattgttaggctcattgttgttatacattgtttaattatagataaatcgtgaatatccttctctcttaaatcgtagcccgaatggaatacttgttgcccttttgcagaaatgcaagggatgcttctgccttcaaagactgctgttccaaaatagtccggttgaaattcataccagcctccatccaagtcggcttgtttggaagtgccgtccgcattcaagacaaaaggatggatatcaatatagcctaattctttgctatacagttccacacgggtgggcaaccaatttgtttcaatttgatatcctctctcctgcaaaagatcaaggagttggtctgtataattggcatcaaaatcaatgtcaatatctctatgcaagcgggtttgctgtccgtacaagacatccactccccagcctccatccaaccaaaactgcatgtccaggctttccaacaagtccaaaacttgaaataactctgtaatcgtagtgtgttctttctttgtcatataataattctttaataaataatactatgcgtaattatccaactgcttgattgaagaaataaaatttgcacccactccaatcagaaagataacccatccgctgatcataaagacggatgtgataccccatgcttccacccaatatcctgaagctacgatacccagcattgatggaaaggtactcaaactaaagatgagagaaaaagtccgtccaagcatgtccgaagccaagttctgctgaataatagcgatgaaaagcgcatggtaaatggaataggctatgcctcctgtaaatgttaggcaaacaaaacctataaatgcgcttgatggtaaataactggcgctaatcagatacaatcccaatatcacataagccgtatgcatcactaatgtttgcttgcttttcaaagccttacaggcaagtactaaaccgcccaacaatgcccctgagccccaacccatttccacaactcccatttgcaaaatgtttccgttgaaatgcagaagcgtcataaaaggaaataacgtaaaaacaggcataaggacaaaagtcaccagcgtaaagcatacgaataaaggcaaaatgcccattgtacgccgcaaggtatgccaacattccgtcagttcttttttgaaatctggaagaactttcgttttttgaagagaaggaatctggacacaaagtaaggtcagacaagcagcaacagctccgatcacatctatgagcagaatatactgtatgggaagccaaacaacgaggcttgcccctacaacgggagctatcacctcactgaaggattgaatggaatggtacaaacctgataccctgacaagatggtgcttgggaaccagtagagggatgcttgcctgtaaagcaggtgcatgaaacgtactgcctattgaacgacaagcagtcaatagataaaaaaaagaaaggtctttataacccttggttatcacaataaaaagacatagggtacagaacgcgatgaacaagtccgaataaaacatcgttttctttcgattccatctgtcaacatagaccccggcaaacaagcctaatacaaattgtggtaaaaatccagctaaaatagccagagataaagctgtcggggatttaaattcgttgctaatccaaaaaataatggagaagccaacaatcgtacttgttaaaatagatatgagttggcctattcctatcacggccaaagttgatttccaatgattcattgtgctaatatttcatgcgtttatagataagtactttcgtacattaagcaaaacgaaattctatccacacaaaaaacttgtattataatccactcctgacgttggaatacaataacaaatactttcaggacgatgtaaagtcctgaaaaatcaaactgaatggatagataaatattagtcttttctcatcggattcttttaatatcgctactcttttattatgtagtggttgtattatcttaaataaaacaaaaacaccgactttacattcttgggtgtaaaactgggtgtttgttttgcaatctgctgattttcagcgtttgttgcggagagacagggattcgaaccccgggtgcctcgcagcacaacggttttcaagaccgccgcaatcgaccactctgccacctctcctaaaaacttccttttcgagaagtgcttttttcttaaagcggtgcaaaggtacaaatcatttttaattctgcaaacttcctttctcttttttcatgaattaatagtacttttgcaccatgatatatccgcagaactttgaacagaaaataggtttcgaccaaatacgccaattgctgaaagaaaaatgtctcagtacacttggcgaagaacgggtgatagacatggcattctccgaccactttggggaggtggaggagcgtttggaccaagtcactgaatttgtacgcatactccaagaagaagacaacttcccggcacaatacttttttgatgtacgtccgtcactgaaacgcatacgcgtggaaggcatgtatctggatgaacaagagctatttgacctgcgccgttcactggaaaccatacgtgatattgtacgcttcctacagaaaagcgacgatgatgaggaagagggcgcttccccctacccttgtctgaaaagactggcgggagacatcaccgttttcccacagctcatagcaaaaataaacggcatcctctccccttacggaaaaatcaaggacaatgcctctacagagttggcacgcatccgccgggaactggcaagtactatgggaagcatctcccgctcactgaatagtattctacgaaatgcccagtccgagggcattgtggacaaagacgtaacgcccaccatgcgtgacggccgtctggtcattcccgttgcaccggcactgaaacggaaaatacgcggtattgtacacgacgagtcggccagtggtaaaaccgtattcatcgagcctgccgaagtagtggaagccaacaatcgcatacgagaacttgaaggtgacgaacgcagagaaattatccgcatcctgacggacttctccaaccagttgcgtccctccatctccgacgtactgctatcatatgagttccttgccgaaatagacttcatacgtgccaaagcattgtttgccgagcaaatatccggactgaaaccggctctcgaaaacaagcaactgctggactggacaatggcggtacacccactcttgcaactttctctcgccaaacatggcaaaaaagtcgtaccgcttgacatcgaactgaatgaaaagcaacgtatcctcattatctccggtccgaacgcaggcggcaagtccgtctgcctaaagacagtaggcttattgcaatacatgctgcaatccggactactcatcccgatgcacgaacgcagtcatgccggaatattcagcagcatattcattgacatcggtgacgagcagtccattgaagatgatttgagtacctattcctcccaccttacaaacatgaaaatcatgatgaaaagttgcaatgaacggagcctcatcctgattgatgaattcggtggtggaacagaaccccaaataggaggcgccatcgccgaagccgtattgaaacgcttcaaccaaaaacagacgttcggtgtcatcaccacacactatcagaatctgaaacattttgccgaagaccacgaaggtgtagtaaacggcgccatgctctatgaccgccatctgatgcaagcactgttccagttgcagataggcaatcctggcagttcgttcgctgtagagattgcccgcaagataggtctgcccgaagatgtcatcgccgatgcctcggaaattgtgggcagcgaatacatcaatgccgataagtacctgcaagacattgtgcgcgacaaacgctattgggaaggcaaacgccagacaatacgccagcgtgaaaagcacatggaagagactatcgagcgttatcaaaccgaaatcgaagatttgcagaaatcccggaaggagattctgcgcaaagcgaaagaagaagtggagcaattgatgcaggaagccaatgcgcgcatcgagaacaccatacgctccatcaaagaagcccaagcagaaaaagaaaagacacgccaggcccgccaggaattgacgaacttccgcgaatcaatggaatcgcttaccaacaaggaactggaagaaaaaattgcccgcaaaatggaaaagctgaaagagaagcaaaaccggaaaaaagaaaagaaagcaggcaaaggaaaagaggacgggctatccgcccaggctttggcagaacagcaggcgcggaaggaagcagaacgccttgcagccatcacccccggctgcaacgtcagaataaagggacaaacctctgtgggagaagtaatggaagtgaatggcaagaatgcggtcgtcgcgttcggcagcatcaaaactaccgtaaaactagataggctggaacgtaccaacgcgcagcctaaacaagctgatgtgtccaccaaaagcactttcatcagtgtccaaacccaggacagcatgtacgagaagaaactacatttcaaacaagacattgatgtccgcggcatgcgtggcgacgaagccttgcaagccgttacctatttcattgatgatgccatccttgtcggcatgtcacgcgtgcgtatccttcacggaactggaacgggtatcctgcgcacgtttatccgccaatatctggaaaccgttcccggagtgcgccactttgccgacgaacatatacagttcggcggagcaggcatcaccgttgtggacttgagttaatgaataattgacagttgataactgatagttaaagctaaatcataaatctgaaatatatgaaatcaatcaaagaactctaccgcatcggtaccggtccatccagcagccacactatggggccgcgcaaggcagctcagatattcctggaaaggcatcccgaagcagccgcattccaagtaaccctgtacggaagcctcgccgctaccggcaagggacacatgaccaatgttgccatcaccgagacactgcaacccgcagcaccggtagaaataatctgggaacccaaaatattcctgcccttccatcccaacggcatgaaattcgtctctttggacagcgaaggcaaggagaccgaccaatggaccgtattcagtgtcggaggcggtgccctggcagaagagaatgacggagcatcatccgtaaacactccggatgtatacaaaatgaacagtatgaccgaaatactacaatggtgtgaacgtaccggaaaaagttactgggagtacgtcaaggaatgcgaggaaagcgacatttgggattacctgcaggaggtatggaaaaccatgcaggctgccgtaaaacggggattggatagtgaaggagtcctgcctggccctctgaatctgcgccgaaaggcttctacctattatatacgtgccagtggctacaaggcttccctccagtcgcgcggactggtatttgcctatgccttggcagtaagtgaagaaaatgcgtcaggtggggtcattgtcactgcacctacctgcggttcgtgtggcattgtaccggcagtgctctatcatctgcaaaaaagccgggaattcagcgacacacgcatactccgtgcccttgccacagccggactgataggaaacatcgtgaagaccaacgcttctatttcgggagcggaagccggatgccaggcagaggtaggtgtagcatgttccatggcatcagccgcagccaaccaattgtttggaggcagtccggcacaaatagaatatgccgccgaaatgggattggagcatcatttgggtatgacctgcgacccggtttgcggactggtacaaatcccgtgcatcgaacgtaatgcctacgccgccgcacgcgccttggatgccaacctttactcctccttcaccgacggcatgcaccgcgtgtcattcgacaaagtggtggaagtcatgaaagaaaccggaaacgacctgccctccctctacaaagaaaccagcgaaggaggactggcgaaggattataagccaatgtagttagagattagggataaaggattaaggggtcaatatgattgccccccctaattctttatcccctcatccctaatcaagttttaccggccaatgcgtatcatccctattaccgctcacatcttttgtctgcagcaggccgccttcttccgaatagaacaattgatactctgcatttcccttttcaacttcaatgacaaactgcataggcactaccggatactccaaaagaacaatctcctctatcttccagccggcatactcactggcgctgaaagaggtctgtactgttcccggaagattattccaaagcaattcggtttccgtcagttgccattccgcctgattattgaaccatacatccttttcctgcccatccactttacaatctgcaacgaaatagccccttttctgttcccattccacatggattgcggaagggtatttggacttcaatgcttgtgacattgcttcgggcactttgacatcatccttgtcgtcatcatcactgcatgcaccaagtgccaaggcggcgatgaacatcatcgccaacatttgaatcttcattctcatcatttctctataaggtttaagttaatagctaccggagaatcagtcgtccatgctgacgaactttccctttttgttgaacttcaaagagtagtcattacctagttcaatttccacgccggtacgtccgcgttcgattttagtaataatctctctcgggaagttagccttcacatactcctttaccggaaccggaatcaatgcttcgggaacagcggacttcttgcaatccacttccaaccaatttcctttcttgtcgaagtctatttccgtacggtctgtcaacagcacttcatattttttagtctgcaatatttcactttcaatcttgatgtgtgaaatgtgcggtttcgagaaatactggttgataaaattgcgtgccgtcagcggaagctgcttggtatcctgagtgatgacatcaccggcaaaggcaaactgaacagctacaagagccaacacaagaatagacaatactttcttcataatcgttattttttaatgttactaataaatttcatattattcacattgcaaataacggtagagaattaggaaagatttaggaataaccgcagttaacagtaaattttactttctttaaccagacgaaaggtatgcataccgtcctgccattcatacgtgagcttcaatgaagacgacaacgcaatggaacgcgctatggcaagccccagtccggtggagtccttcttgccatccatgccatgatagaaacgccggaacaacttctctccatccaaaggggcatcccccgtattcctgatgaccagagaagcgggagtagtaaacacctgcaactctcccccttccctattgtgcagcaacgagttcttcacaagattggaaaccagtatttgcgccagcgaatggttgcaacggatgataaaaggctgctcctcccgttttcgtatcagtctcacctgcttatgttcatagatatccatcaggtcgggcaagagttcatccaatatctcatccaccgagacatcctccatctcggtatactgcccgttctctatacgggaaagcaacagcagggacttgttcagttttacggcacgccccagcgtggcatatatctcgtccagctgctccatttgctgttccgtcatcccttcactctcagccagcagttccacttttcccctcacgatggcaagcggtgtctgcaactcatgcgaggcattctcgatgaactgcttctgctcctcgtatgccttgtagctgcggttgcccatatccaatgcagcatcgctcagctggcggaactcccgtatcttcgtcgggttgtccaatggaggcacctccttgccgggctgaatgcagtgcagccagtcaagcaacctatgtaacggacggaacactcccttcagcaccaactggatgccgatggaagtacagatgagaaacaacaggaacagcgctcccagataccaaagcatagcctccaccatgtcatcccgctccaaaatggaaatcatcagtttcaactcataatattgcccgtcgggcatacggaaagcggtacacatgacacgtaccggttcgtcttcatcctccagttcgatataaaccgtagcatcatagaacacttgtctgtaatgccgcccttcctcttcggatataggggtgaacttatagaaagacatcaacgagccttccgtttcgagtatcgaggggtcgtgaagcgcactctccatcaatatctcaccgtaattctccaacgtatcgtccgtctcatccaccacctcgtcaatgattgcgtaatagaacagcacaccccacactgccatcaacagaaacagcagcaatgcaagtttgcggtaggtgtagctcagcagcttcatagttcggagagtttgtagccgaatccatagacagcctttagttctatggtagcctcagcttgtttcaatttcttacgcagattcttcacttgcgagtagataaaatccaacgaatccgcctggtctatattgtctccccacaccgactcggcaaggctcattttattgatgacccggccggggttgactacaaaataatagagcaggtcgaactccttgcggttcagctgcaagggttttccgtttatctctacctgccgtttgtcggggtagagcaaaagatttccaagggtgacggtcacatctcccttcgcctgccgccgacgtatcaatgacttgacacgtgcattgagttctgccagatggaaaggctttgtaaggtaatcgtcggctcccagttccagcccgtccaccttgtcgtccagcgagtctttggccgagataataagcacactgtcactgcgatgcagccgtttcagctcacgcagcaagtccagaccgctcccgccaggcaacatgatatccagcagaatgcagtcgtaatcgtagtcattgattttatccaatgccgaaaaatagtcggcagcggtctctacaacaaacttttctttcaagagcgaagtgcggatggtttcccgcaaatcttgctcatcttctacaatcaggattttcataccggcaaagatggtctataaaactggaaacaatctggaaaactatccactaatcaatgctgtctgtctgataatcctccatcagttcttcttttgccatggagattttcccgtcagccgtaatggtcagtctgatgggaacataaaggtcggattgcggatagcagacgctggccgcgtatatgattccttgcggagtggtcttgtcatagaccagcccctcaagaatagagtacttcatgaacttggcatccaccaacgaagcaaaattatctttggtgaacactttatccaccacctgcttcccgccgcacgtgatgcgcaaggtgatacggttatccacaaatttctccccctgctcgtttttcactatcggcagagattcatccggccggcgcactacagaagactgatactcttttcccttatacgtaaaggatgtttttacatcagacacctgcatgcgctgtgggccggcaatttctgtactatcctgcatcaatacctgcgtaccgtctttcttattcttgtcttgcgacgaacaagcagtgaagaagatgaccgatgcacacactaaaatatagactatattcttcatcgttctgttttttagtagttgaccggacaaaaatagtacaaattgaatgcaatagaaaatttattttcttttagattccatttttgcttttctatcctgcactttcttgctgtatgcagcatattgttcttccgtcataatcttccggagttgtgaatcataagcaatacgggcagtcttcatctcttcacgcttcttttccatctccgcttttttctgcgcgcgttgctcatccgtcaattgatggcgcttgccatctctcttatgatgcttgtgtgctttggcacgatgcatcggcatatctcccattttctcaaccaatgctagatttgcctccagcagttgttgtttctgcgtatcgttcaaggagtactctttcaccatccgttccgtcatgcgctcggcacggactttcggttcgggcattttatcactgtggcgggcatgttgtgccattgccatgccacccatcaggaaggcggccatccatatcagaactattcttttcatcatttttctctttttttaattaataccttatgttagttatacctattgtgttgcaacgtatctatgacaaaaacaaaagcaggaagtttaaccgcaacttcccgctttaacataataaatgaggttgaaaagaatattaaggttcgtccagatactgtacgataagactcacctgcttcggcatgaatgtccgtgtccttacattgtagccggtatgcgccaaggcttcatacagctcgtgattccgttttatccaccgcgtcagggtgcggatggcgcaacgtgcagtagcattggggcaatagaggcatgccaaatctttctttttataagtcgtgatacgaaagccattttctgtttccatagcagtttgtctgatttttcaatgattgatgtaaagatacgatattcaaaaagcgaagtcaagtatttcaaggagaatatgaacctttttctgagaaagttcatattctccttatttacagaatgtttatcctaacggattttctccctggtcgccatcggaaccgccgccatccggatttggtttggagctacccccaccagaaacggtgccgttgcccgaccaatccatcttctctacactggcacgggtcagcatgtccttaaagtagaagcccggagtgaagataatcttgcggcgataaatcgtgcttgccttcacatcttccagcttgtcctggctcttggcgttgatgccgggacggaaacagccgaactcacccagctgtaccgaaaatcccttgttgatatccatattcaaggtgtcgatcaatccgtccagcaccagcttcaccacaccgcgaggcgccatgcctatcttggaaacctcgtcgcataaatccttaaaacctaccacacccaaagttttcatctgcgccacgtacttttccatttttgtctcgtcaaaaccgaatactctcttttttacttcataattcaaagccatagttttttaattttaagttgattaataaaagtcggtcttgttcgctcgtcagtctgcaaaaccagtttctttgtgaccacgatgcaaagatacaacgggcagaaaacggggtggtgctttaacggaggtttaaggaggttttcgtaggataaaaaaggatattggaggaggagaaaggagctgataaacaaggagtaaaaaaactttgagaaatattatcggagatgcttctttcattcagtttatcagctctaactttacctttatggctgggggggatacttgatggattatttttcttcagagacttgtgcagggctgatgccaagagctatacggaaaccgccatattcatcacgatacgttcccatatcgtaatcaatgtaggacacacggcaccctttggctgttcctccccaacttccaccacgcagtacatggcggaaatagagatgtgtcccctcaaaaggccagcccgaatggacggacttgccattttgttcgtattccttggtatataaatcctcacaccactcccacacatttccactcatgtcgtatagtcccaattcatttggctgcttcataccaaccggatgcgtagtgcctttatctccggatttgtttttctgataattgtcaatataccaggcaaccttgtctatatgatggctgccactatacttatatcctttgctctgcctgccgccacgggcagcatattcccattccacctcggtgggcagacgaaaaggttgcttcgtgaggatactcaatttggtgacaaatacctgtgcatcgttccaacttacaccttccaccggacaatcatcgcatccggtattaaaggaagggttgtgttcgctaccgattacggcattccacaatctttgagtcacttcatattttcctatatagaaagaatccactttctcttcatgtaccggtttttcattctcttcgcaatcctttccctgctcctttgtacctcccatcatgaaggttccgccttccaccagaaccatttcaaaattttcaccgtttacggtaaaagttttggtcagatttggttcttgttcggatttgtcgggggtacatgccattgcacaactcagcacaaaagcaagcatcagattgtttattccgttgatatttaaaaaaaaattccgcataagcctttatctctaactttagtaaactgcttattactatctttaatggatattctatcacaactcaaatatacggaaattatttttaaaatttattccgatactgaaaaatcatttcagatgctccctgtctaaatactacaatatacctcattagcaaaacatgtgcctgatatgtacccgtttaccggattaaacttaaattcccggttccctattaacaattctctttttccgcatagacgccaatccccatataacacaaatccaaatagacagcataaaaaagttcaggttcttttctctctgaatttgcgcttgcaaactccaaactcttttttccgaaaaacggatagtggtagtttcgtgaaccgacaggacatagggcaatgtaccttccacatgaaatacattgactttcatctgtctttatagggttctccgacgcaatggcatgtgtcgggcactcctcgacacattttttacaatcaatgcatgtgtcgtcccccgtaggataaagcggaacttgcagtatatcccgataaagtctgctgcccctaatatttatatccggtatcgcactcgtatccgtaatgcccgatagaagctgccatgacttgcaaccgaaatcatcgactatacggttgtcttccatatcgggacgttcggatgcgacatttctgaatactgagtgtcgggcaatgaatgcggcggcagacacgattctaaacccgttggcagtcagcaaatctttaagctcgacaagcatatcttcataatctctgttcccataggagcaaacgataatggcaggagaaccgtctcccttaactcgtaaaagctgttgtgaagctctattttcttgaatccggctttcgtccaatcctgcaaatatctcttcgacggattggttcgcggccatattcaacgtatggtaaatttcttctccatgttctgtaagcttttacgaactccatacgattgtcgttcgttgccttctccctatatatgtattctttcgcctccagctttttcaatatgcgggataacagccctttatccatattgagctcacgggatatgtcctttgcatttcgattcggatgcaaatacacatcttgaattttacctctttctggcatacaccacactcggccccatcccatgcctcatcagtaccccttcttctataaacctattcaaatcgacaaccgcctgcttataactacgtcctgccagccgtgcatactgggaacgattgatgcagggatattgctgcaaatactcatccagcaactgccagcgctgctccacgcccaacgcctcatcggcagacgaagcaggcgccgatgccgattgcggacaacgctccaactgcatctttccttttaaatctttatagaactccctgcccagacggaaattcaaaccgcgcaaagcgatggaagcggcacgaagctctttcttgtccgtcgcctggcaggtacaactcaaagagggggtgaagtaacccagttcgcccagctccaccgtccagccattggcaaggcagtcgcgcaactcgtccataaagcctgccatcgctccttccagcaggctgcggctgagaccggtgaaaagatgtacacgctcgataaattccttgcggtcgatggtgcccttggggacaaagcgggcataaagggattgttgctcgccggtctggcggacgtcgggtttctcgaaaaggtcgtaatacgcactcatatatattctgtttttaaatggttctgtaattccgttttttcttcttccctggcatattaaggagaagaaatgctattctttaatcgttccaccatggagaaaatatcattccaccacggaagaaaaatcgttccaccatggtggaacgatttttcccacacgatggaacgatttaatagtagcatacaaatatactaatcgaaaggagggaaagcaaaaaaattcccataaaaaacatatctttacgccggaaatgaaacatataaaaaacacacaccaaactcactttagagtcatgaagaaaatatatcccaaagaatggttggaactgcatccttacaagcagacaaacagcgttgaccagtactacgtcggcattgcaaacgaaatccacaaaagactttattcttcaacgatagccgacgccttcgaagaagaggaaaacatacgctatacaagcctctgcctcgccgcatggtttgaggacgtcatctcccagaccggcatctggcaggcattcactgccgagtgccggaagcgatacggaagctatctgcccttctaccccatcaaaggcgattattttccggatgaaatcaatctggaggacatacgctttctgctttggcaccatatacaatatctatgccggggaataagcgccatcaaccccgagaatcccggaatagagcagactgcacaaaagatatacggactgcttgcagaggaatacgaaaccgctcccgaaaatgaaaggatgcaggaatttctataccactctgccatggaagaagaagacttcttccgctaccgggagatactggattggtttcactaccaatgctacttcaacatcgaaaatgtcgcccaataccgggacgaagctgaacggttgctggatgatgaaaagattactcccgaaatggcagagaccctcatatatgccacacgcacctcactgacgttcaaagggcgccgcaacctgctgtcgctgacctcaccggaatggctggctctcatcggaaaagcccatcccgaacatcagctttggggcaaggtgaaggcacgggaaaacagttgctatctgctggagaaagaagacggcgagtatctgtatgtcagagatttgtgtagtgaagacaaaggcgaattcaagataaccaagaagtccttgaacctctcagctatccgtagcagagaagtagggaaaagcacccttatctgcgaactgatttattttggcaatgcatggtggcagtgcggcatgcttctcgaaaacaagtacgaccagaaaatagcggaatatgtggacgacttgacgaaacagaaagaaaaaacgaatgaaaaggctacattccatgatttcataaaagcatccggcgggaaatcttttgtattctgccaatcgcaagaggaaatctctgattttctgctgaacaagatgggatacggcttgaaagaagacctgaacataccacgcatacatacagaaaccggagccatgctgatggccaacccgcacaccggcctacatatccaattcaagctgtgcgaatgcatcaaatctccggacaactccaattataataaggaggaagcagagaaaaacgccattatgttcatcgtcaacccagacattatcccctaccaattgagttgcatcctgcaagacgaaggcatgcttccggatgcttatctgaacagtttgcaaggaaaagaatacgggcaagagttcatacgcaagaatgcacacttcctgactgattatttccattatcggtgtcgggagaaagactttgattagttgaaaatgggggtgaataccacttttgacacatttccaactaccaattatcatagtgctttccagaacttctgaaaatccttataccgtccgtagcacactaactggtcgccggcttgtatctggtcattttccggcagttcgttcaatacattgtgttccacatacgagatgcccaggcaattcttcaaagtctcggcacgtttcaaggcgagcatcttcaggccaaactccttatcgagattcaattcgttggcataatagccaatgaacttgtccggaacagtgaacttgactacataataatccggtgccacgcggaaggtctccatatcggcaccgaattccagcaaccgtaccagtccgcgtgcggcatcctcctcgggagtaagaatgcgttccagctcaaaggcctcgagcacggaacggtggacagcgtcaatggcgcgggcatagatatgctgcaccttcttctgcttcagcaaagccactacacggatggatgcaccgaaattctcgccgatggcaacaatcaccacgtccacactgttcagcggcaacacggacagcgcttgctcgtccgtcgcatcgatgacaaaggctgtagcaatcttttccttcagactatctacccgaccggcgctcacgtccgcacctatcacttcgtgtcccaatgcagaaagctcttctgccagcacgtgaccataattccctaaaccgataataatatacttcatcttatttaattgattataatctgaccactcggatactgatacttcgtatgcttcttctgcttgatgatgccaagcatcagcgtaatcagtcccacacgccccacaaacatcagcagtgccaccagcagcttgctgtcgtctcccaactgcggggtaaggttcaaactggaccccaccgtgctcaatgccgacacacactcgaaggtaatggccaaaagcgacgtacccggctccagaatgctgatgatgaaaataaacagcaacaagacgccgaacgacatcaccaccgtggcattggaacgacggatagaatcgtgtgacagctcacggccaaacacctctacccgttccgtgccgcgcaacacagccaccagattcagcaccactaccgcaaaggcatttaccttgataccgcctgccgtagactgtgaaccgcctcccacccacatcagaaacagatatataagcaatgtctgtacccccaagcctgccaagtccacactggtaaagcctgccgtacggggacacgtggcattgaaaaacgcctgcgtccacttgtctgccaccgacatgccggcaaaagcggcattccactcaaagacagcaatgcccaccgtgcccagcaccaacagcaggaaggtgactatcagtacaatctttgtattcaggttgtacagatggtaaaaacgcctgccatcccaatgccacgtacgcaggaagtgccacagacgacgcagatggtaaagaataatatccttgaaattcaccaggatggggaaaccgataccccccaaaataatcagcagagatatatagatgaagaacgggttgtgccccgtcatcaccaacggattgcccagatttccgggcaacgtggagaatcccgcattgcagaaagcggaaatggcatgaaaagcggaaaaagccagctcttcctgaaggtccatccccatcgtcccgtggatgtctccccagatggcaagcatccctattccttcaatcaccagcgtaaaggccagaatatagaccagggtggagagcagagaattcaaggaattggaactcaccatgtcgcgcaccactaactgattgtacaatgaggtattacccatgaagaacatggcaaaaaagctcgtcagtgtcatcactcccagaccgcctatctgaatcagcagaatgattaccacaaaaccggtcggggtaaaagtggacgccacatcgacagacgtcagccccgtgacgcacaccgcactggtggatatgaatagcgagtcgacccacgatatgccgttcaccgtgcagcgcggcaacatcaacaaccccgtgcctatcattatgattatcagaaagctggcagccaaaataagcgaagggttcgtacgccgccccagcaaccgtaccagcccgttggaaaggctgaaaaaggaaaacaccagcagcaggacaaggtgataggccttgccatgcagaaattcccagaactgcaagatggcgccctcctcctccggacgatggaaaatgaccggaataagggtcagatagagcagaatggtcagtatccaagtgagcttactgaacgtgcgacgggtatccttgtattccagcaaaatgcgcagagtgacgtctgccagaaaaacaatccacaccccatgatacaagcgctggagctgatgcgcctcgacctctgaaatcgtaaagccatgctcatagaccacgccgacaatcagcaggatggaggccaaataagtgatggaagtcattactcccactgtcatccgtacgtaagggtgaatccatttattttgatacaaaaggaatttatgataaatcttcataaatgcatcgattaatgaaacgcggcaaacttagacaaatataccttgatatacaaaaaacaaaaggaaaaagaaattggttcaaaaataatagctacatttgggcattgaattattaataattttaaccactatgagcaacaaaaagaaaagattcattctcccggaagaggaaatcccacagtactggtataacatacaagccgatatggtgaacaagcccatgccgccgcttcaccccggcaccaagcaaccgctgaaagcagaagacttgtatcctatctttgccgaggaactctgccgccaggaactgaatcagaccgacgcgtggattgaaatccccgaagaggtccgcgaaatgtacaaatactaccgcagcactccgctggtgcgcgcttatggattggagaaagcactcggcacaccggcacatatctacttcaagaacgagagcgtcagcccgatgggctcgcacaagctgaactccgccatcccgcaggcgtactattgcaagcaggaaggagtgaccaacgtgaccaccgagaccggtgccggacaatggggagcttccctggcatatgccgcccgccttttcgggctggaagctgctgtctatcaagtgaaaatcagttacgagcagaagccctaccgccgcagcatcatgcagacattcggtgcgcaggttaccccgtctccctccatgtctacccgcgccggaaaagatatactgaccgcccaccccaactatcagggctcgctgggaacagccatttccgaagccatagagctggcacagaccactcccaactgcaaatataccctcggctccgtattgagccacgtggccctgcaccagaccgtcatcggactggaagccgaaaagcagatggaaatggcaggtgaatatcccgacaccgtcatcgcctgcttcggaggaggttccaactttggcggtatcgctttccccttcatgcgccacaacatcctcgaaggaaagaaaacacgctttgtcgctgccgagcccgcctcatgtccgaagctgacacgcggcaaattccaatacgacttcggagacgaggctggatacactccgttgctgcccatgtttacactgggacacaactttgcccctgccaatatccatgccggcggcctacgctatcacggtgcaggtgtcatcgtatcacaactgctgaaagacggttatatggaagcggtggacatcaagcagctcgaatcattcgacgccggttgtctgtttgcgcaagcagagggcatcatccccgcccccgagtcctgccatgccattgccgccaccatccgcgaagcgaacaaatgcaaggaaacgggtgaagagaaggtgattctgttcaacctttccggtcacggacttatcgacatggcatcctacgacaagtatttgtccggcgatttagtgaattacgagctgacggatgccgacatccaaaagaatctggacgagataggcaatctggcttaatagatattcgccatactgacaagcggttcatagagtttctctatgtcctgcgagtccatcttaatctgtacctggtcccccggaatcaaacgagttcctgcggggaccaagttttttccatcccgatgcacattgataatgacgcaacgctccggcagggaaagttcgtccaccagtttcccatccagataagagtccgtcataatctccaccgaaagcgtatagcgcttctcctccttaaaataaggagcatgaatcatatcttcatagagggagacattggaaggcttcatttgcagcagttccgtaaaatagtaagtcagcccgcctaccaccaccgaagggtaaaagacctcaaaatgccccgtaatctccgtaatcagcacaatggccgtgagcggtgtacggaccacggccaccagaaaagccgacatggaaacaagcatgatataactgacattctcttgcccgatgacaccgtacctcactcctaccagaccgacaatctgtcccaacaaccctcccgtaaccagcgtcggaatgaaactgccgcccggcaatccggaagagacagagaaaacggaaaagacgaaatgcagcaacatgacagccgtcacccacataatctgcgtactgccgttctgtgcctgggccagcagaaactgctccccgcctccagtcagattgacctgcatcagcgaaatgatgtaggccaccagcaccagatagaacatcttgacatacgccggagaattgactttggcatacacatgcctgaaagcattcatggtggaggagtagaacttcccgcatacggagacaatcaccgccaatatcaagaaatacttcatctggacaaagaaggcgaaaaccggttccgttacttctatcagatggtaaggattcacaggaaagaccatgcttgccacggttcctgccacaacacccgccagcaaggtagtgatggccgtcttaggggcatcgaagcgttcaatggattctattacaatgagcgaggaagccagtggcgctgcaaaagccgcagcgagccccgctcccgccccggctgccagcaactgtttctgttcgcctttcaggatatgggtccagcgagataccaggctacccacataagagcctatctgcacggaaggcccttcgcgtcccaaagacagccccgccgagaaggacagaatgccccctacaaacttggataccatctcgatgaaaggatgccggtaagtgatgcgcccgttaatcacgccgcgtgtctgcggaatacctcccccaccgataagcggcattttccccacgagccacatgacgaagacgagaatgccccaagaaaacagaaagagtggaatgtgccagtaccaggccggatgcgaagcgaagaaaccactgcggaggtggaacagataatagagaagatagtgatagggcacagcgaccagtcccgtcagcaaaccgacgaacatgctgacgaaatacaaccgggcatccaccagcttcaacttccagatgtgccagccgcgtactgttttccagttcttgaccctcgtccaaagacgttctgccttatcccatagttccataacaaaacaactcccgttaacttgcgctttacaacaacaagcaacgggagttgttttatacagaaacattatttaccaaaatctgttctttgcaggattatactcaaatcccacgagcttcaattttcgtacaatgtcctctttctctacgttcatatcctcgcagagcgcgtccagcgaaggatagaaatcacgcagtttcatgttgatgaagctgtacagcatcaccgggtcctcaggtaatctcatagttacaatctttaaacctaagttcaagcggataatgcaacaggagtgagaatgatgacaatgagaagatacgaaaagaataatttttcagaggaacagagaaagaagatttctttcccttttgttcccctgtggaaaagttgtttctttgcatcttccagttccccaacattcagttgcaatatgaaacagctaaccgaagaacaaaggtataacatttccgcttatctgcaaagcggaaagtcaagaaccgagattgccaatcttgtaggagttcatcgtagcactataagtcgtgaattacgtcgtaatagtgataaacgtaatggcatttacaaaccggatctcgctcaggctaagtatatgtccagaatgcgttcacgaaagcacttcgtgaagtttacggacgacttgaaaattcaagtagatatactcataaagaaagatttcagtccagaacaagtgactgggtttatgcgaacaaagggcttggaaacagtttctcatgagacaatctaccagtatatttgggaagataaaaagcatggagataagttgttatacaagcatttaagaagacggggaagaagtcataagaagagaggtgcattgactaatggacgtggttttatcaaaaaccgcgtggacatagacaagcgtcctacgatagtagacaagaaagtacgttttggtgatttggaaattgacacagtcattggaatgaatcacaaaggagcactattaactataaacgacagggtaactggactagtatggataagactacttagcgggaaagatgccagcccgctaactaaagctgccatcgatgccttggaaccttttagagaccaaatacatacaataacggcagataatggaaaagaatttagttttcacgaagaaattgcacgtaaactaaatatttttgtttactttgcaaaaccataccactcgtgggaaagaggagccaatgaaaacagcaatggtttgattaggcaatacttcccgaagggtacggactttagggacataaccaatgaacaggtaatgcgcgttcaaaacatcttaaactcaagaccgagaaaaagattgggttacatgaccccaaaggaaaaatataaattattaactaacaatgaattcgacactgttgcattgtctgtttgaattcaggaaatttaaactaataccggggacaaaattacaataaaaaaacaaaatagagataattttagtgtagaatatacaacctacccaccgcaaacgattgagggccatgtttacggagcttccgtctgctctatcttcagggacaccttttcgatgatctttccaagctcctcttccagcggaatcacattgaagtcgccccagaaatcggcatcatacttgaaattggtttcagagaagacggtatgcaccggcaaccgttccgcacgcgggaagcgcgtcacgttctccccgtcaatccggcaggtcaccatctcgaaccaggtatacagagtgggattactgaagagcatgcgttttctcttcatcttgaagtaaaggtcgccacggatgtggtggacataataggtaccgttccagggtttgtatgagacggtatagacaagtttctccgttgtcagcctgattttcggagcctggcgtatcacgaaaagccgtgtggcggccttcacataccggggatgaatttcgaagcgggcacgcagcaaggcgctgttctccgagtctatatagagttctccgcagaacaaaggctcctttaccccacgtttctgctcaaagtagacgacgttggcagtacggtcgtccaccgatacgatgtcacccgaagtataggtataaagttcctcgccggattccagcaagaggaagtctggaagattcttcatgatgtccaactgcagacatgcctccaccccggagctgattttggcaagcacactgtccgtctgctcccggttatctatcttgctcatcttgagcagtttcacctggtctttctgtccgggttccatcgtcggtgatttgtagaccttgaaaacggcctccgtcaggctctggaacttgttcttcagttgtacaccttcccggtagaaggtggtcagatagaccggagaagtggagcagttcctatcccggtgctctatcatctcgcgaagcagctttttaggctccaccaagcggataagcacttcttgcaaggaaatgactttcggctcaaggctcaggacattgctgcgtccttccaaagcagaggcttccaccgtttgccccacataacccagatgggagaaggagagcatgcagcgcctcaacgagtcgggcaggttgagccggaattcaccgttctggttggtaatgttacccagtgaggttccttgtgcgatgaccgacgcactgacgacgggctctcccgtctccttgtccagcaggattccggcaatggtggaatatgccggtcggggcggcaggggtaccgtttcttccatactcttcctttctgccgcccgtgttatcaatatatggttgcctaataccttcaattcgaggttccggctgccggttatcctatgaatggcctgcctcacggaacactcctgcttcctgaccctcaccactgagtcgttatggatgaccttactatcatagataaacagatagccggactgctccgagactttccccaacagcgcataaaccgttcccttcattccaggcagccggacgatgcggtccagcacatcgcctccgtccgctcttgcactgcctgccaggaagaaaatgaagagtggcaaatggagaatgaagcatttcattgaattcattgttccgacaatatcagtctattgccctgacgtgtacacttcaagtcgaacgtccagcatatcagctcggccacagactccggggagttattcgaaaattcgaccgtcagccgccgtttgcccagggttggtgacgcggcttctatctgccagccggcagactccttattgatggcacgcagcacatcctccaggcactcgtccttgaaacggatgttgctggtgtagcggtcaaagagctccggattctccgtctcgctgacgagcagactgcccccctgcaagataaccgtttctcccgcctctacaaagaccgtctgttcctcttgtttcagcagcaccttcaccttcccgcgcttcacggacaagctgaaggggagcccttcattgctcctgacattgaaagccgtgcccagtacctccacacgcaccctcgccgtctcaatcgtaaaagcctgctcgggtttctttgccacatcgaagaaggcttcaccctgcaggttcacttcccgcttgtcttccgcaaaatgttcgggatacttcagcgtgctttcctgcgccagatataccaccgaaccgtcttcaagggtcttgaccagtgtgggcttctcccggttttcctccgtcagcaagctacgactgtccccaccttgttccggtacggcccaccatgcggcaaaacatacgattccggcaatcacggctgccgcaacgctcccccacttgaggtaaagcctgcggtgcgttgccggagcgtgttccgcatctgccggcagcaggcagtccgtttcgaagcgggcataaagccgtacccatgcctcgtcggtccttgtcttctttttatctacttccatcattgtgtccggatataattatcaatttcgtttcgtaaggttcggagtaccttggtcatttccgcttccaccgtcttgacggacaacgaaagcgacaaggcaatctctgcatatttcttcccctccatgcggtgcatcctaaaaatctgctgccggcgccggggctgcttgtcgagcgtatgccggatgagggtctggagttcctcgtactccaaatgcgcgtgggggtcggacgaatagcccggcccggactccgtacggacagatgcccgatagcgctccttgacctcctgatgctcacaaaactgcacggcttcatttctcacagaacggtagagatagcttttcacggactggaatacttgtaaccgctcccggttcttccacagcacgtagaacagctcctccacaatttcctcggcagacgccgtatcacccgtgatgcccgcagcataccagcaaagaggggaataataccggcggaagattccttcgaacgcctttatatcgccctcctttattctggccagtatcatcagttcgtccagcatacacggtgttttttctcggttgctccaaatataaggaaaactatcagataatcaattggattgtttccgcaatttattgactgcattctccagggattccgtaggttctatgatattgtagttcctccagaagtcttcgttccaatactcatccaccaggtcgtagaatacctgcttccgtttgaaggtgttcttgttggagatgccggagagagggctttccgtcctgtcggtcaccaccatttcggagaaagcggtgtagctggaggagaacagtctttttttccagtcgcatttaaagcggatgacattccgtatatagttcaggtaagtcttggtcccctgctgcttgtaagtcaccagataggcgacttcctgcgggcggaaccgcaagccgacgggcttcttatgcagaatggcctccactgccttcacccggtttgccatgtccaggccaaactcggcacgtgtaaaggagagccgttcgtagtctatatacagtttcccgatgaacaaggcatacatcaggctgacccgcggacggaagctgactacatactgcatgcggttatccagattgacggggtcctccatacggaattcataatagtccagattgtccgtgctcaacagcgcatcgccattcttcacaatgtccagataaagggacaaattggggcctcccaccactttcacagccagcgtgtcactctgcttttggctcagcaggcggcggcctttcagcagctgcaccttgtcgcggtctacatcgcgggagttataatccgtcttatagacatccatcactgcctcggacacgctgatatagcggcggcgcttctgcacggtttcccgatagaaggcggtcagcatgttgtcattgccagaatagtttactggaattttcttgatggcctcttccactatgacgcggggattattgccatagaccacaatctcgctcaaaagattgggagccggtatcatccagatggtcagcccgccctttttttcaagttcttccagagagaggtgtgtagtgagatagccgatatgggagacttccagtccacggaaagcttccgcttccgctactttcaaggagaatgtgccgtcggcattggtcaccgttccgatattgttgccgacaacagagacgttcacgttttcgagtttcttcctgctgtccttgttcttgaccgtaccggtgatgacgagctcgttcactgccgcgtcctgcgccatcaacggggtgatacccgaagataagaatgcaaacaaacacccaagtgtaaatcctacaaagtttttcataaggcatgtttttaaggggtttctattaataagagcggtgaggaagataaaaccctatggaatggagagaaaaatacaaaaaaagtagcacgttgataatcagagagaaattttgccaagacattgccataggtttggcaaaactttgccatgcctatggcaaaagtttgccaacgcggtggcaaagtcttgccaatagtaaggcaaaaacttgtcaagctgttggcaatagcctagttgaattgttggggcttccgctggctcagaataacgtagatgatgaccggcgcaccgataatgggcgtgacggcattcaaggggataatacccgcttcgccgggcaagacgcaaatcaagttgcaaagcagtgccactgcaccgccactcaggatggtgaccggcaatagggaattgtgattggctgtccccaatatcatgcgggccacatgcggcacggccagaccgataaaagcgactggaccacagaaggcggtggtgacagccgtcaagagcccggtgataatcaaaagccagttgcgcacacggcggatatttacacctagattttcggcatagcgctctcccagcaacaaggcgttcaggggctttatcaacaataatgagccgaacagtcccacaatggtgaccagcgcaaaggccggcatctgctgtagggaaactccaccgaagttgcccagcccccatatcatataggactgcaccccctctgccgtagcaaagaagttcagcagggcaatagccgaagaggcgatgtaacctatcatgatacccgttatcagcagcatgatattgctctttatcagcgtggaaaagaaaaggataagtgccataatcagcatggctccgataaatgcgccaagcagcacggagaagaagccggacagactgaacgcccctgccgtgatgctaccgccaaacagcagcatgacgaaggccactcccagacttgccccggcgttgatgcccagaatggatggtcctgccagcggattcttgaaagccgtctgtaacatcagtccgcagacagccaatgcgccaccgcaaagcagcgccgtcagcgcttggggcaaacgggattcccaaaggatgaagctccagcttgccttctccccctctccaccgagcaggatacggaaaacatcggcaggcggaatcgaaaccgaccccaccagcagattgcccgcaaacaacaataagatgactactcccaacccgataccatatttccagcctttactcatagttacattatttagcacacggaggcacagagttttctattactttcacaaaaattccgtatctctgtgttcatcactccttcagtctgcaaaaatagcgcaagcctcccaaatctcctatttcgggatgcagaatctgtatcaggtcggacaacaaataatcgggacggaacggagtctcctcgtagaaaggaactttcgccgtattacaaccatagacattccgggtcttgaaagccttaaaaccggtgtagccgatataatccgcctccaaatcagcatagctcatgtcgcggtcgcggttgtacttcaccagccagacgtcggcatcgcccgccttgtcgaaaacggtctcgaaagccagaggaacagaaccgctgtgggtatcgtcggcaaaggcgtaacgcccgcaagcatcctgaaaaagccttcctatggtgctgcgccctcccggcacgtaccatgccgagccgcttttcaactcactgacaacggagaacgaggtggatgaaagttgcgcacgcatcttgagtcgttggtaacaactgtctacttcggcaaaaaggctgtcagcttgtggcgcagccccgaagagcagtccgtagaaacgcatccactcggcacgtcccaaagcggaggtttccatgtagtcggcacattcgatgatgggaatattcagtttctcgatacggccataaccgccgctgttctcaaacggagagagcaggatggcatcggggtgcaggtcaatgatgcgctccatgtcgggattcatgccgtcgccacaatcggcgatggcgccccggcggcaggctttgtgcacggcgggtagcttgatgtacttcaagtcgcagacgccgccgatactaccaaacacacccagattatccatcagtccgcagtggacggaagagtagataactgatttggagagcggggtacgtaccacagtacctgccggaagatgtgccgggagttcgcggtctttcgggaccagtatataggtatgtagcgtgtgcaacgtatcccaaggattgcgcaaggtggcaagggtatagccgggataggacactaaggtaagattctccgcataacgtaagggaatggtgtcaccgttgaccaaaatagaggcagtcttgccccttcccccacaggagaaaagaagcaagactgcgaatatactgataaaaaagcagcctcttttcattgatattaattaaagaagatagcggaattaggattgatgcctcctgcatcgaacttctcgataaatgtaccgtctttcttgaaacggtagatggtaccgttcgttgtgaactcggaagtaccgatataaatatcaccgttattttcgtttacttccaacatgtacaacgtgcttgaagcaagttcggcaggggcgtctttgagaaaagaagcattattcatctgcccggtcttgatgttataagtaaagaaagtgttgactgttgtatatggttcagtattccagtccgtcattgaattcaccagatataagatatcatcagcagcacacatacgggtggcactgcctaattccgtcaccttattgttggcagcaggatctatcatctgcaatgaatagccaacatcgccataattgccccatgaaatcaaaaagactttatcatcctcttcaatcaaagcattggggttcaaacctaccgtcaactgctctttcagcttgaaagtgcgcaaatctatcacctttacgtcagtgtgccgagtgctccaatcagcagtacagctattcgccacatacagcatatcctcgcagattgccacaccttccagattgtcaccaagtccggtcaatttatccactacctccaacgttttcgcattgattttagccacagcccctccgtagaaggaagcatagatatatccatcctcagcgtctatatagcgaataccagcactgaggtcattatcatctacaaacgaaacacgtttcaactccacacctgcagcattcagcttggtcagataattggaaccgcttacagctatatatatttcatcttcatactcaatcatgctctgaccaaggtcacccaacttggcattgttttgggtcttgtagatatcattgataaaatccgcatccttattgggtgcataaaaagcaagtcctgcattgttggctccttgagagccttcgttcagaatatagacacgcgtctgcggcagtgtcaccttcgacccgccgtcatccagagaatcgtcatcgtcgtcactacaagatgccaaagaggcacccaaagcaagcatgcagagcataccgaataataaacttcttactttcataattacagttgttattgtttataattagtttttattgttcataaatagattattcaaaacttgaaagtacccgtcaaccgccacgaacggcccggcataggataatattttatcacgtcatactgctcatcggtcagatttataatctcggcctgcaacagaagccggcaaccgcccaaaacaaactcatgagagaggctcatcgtatgctccagatagccctcaatctcattttccggaatgttctgcgacaaatagtaacgctttcccactcctaccgccgagtagcccacattcacccacggcgtttctacaatggcggacgcgtttccgctatgaagaggagtataaggcaattggtccttatagttcttcgcgtcggaatcggtcaggtcaatggccttttgccatgtatatccgcccgacataatcagtcttattttctccgtcaatggaacggttgccgccaaagtggcatccacacctgcggcatgcaccttgccgtagttcgccatcttccacgcataggtggtgggaaaagccacaatcttatccgtcacattattatagtaaccgtcaagcgtaacggagatataatcgaacacagacaatccggatttgctccatgtgataccgacattatattcgtctgccttctcgggtcgcagattgcggttgcccagccggtaataatagaggtcgttgaaagtgggcagacggaacgtactcttatacatcaaccggaaatacagcgactcgtcctgccaaggctgcatactgactgataaagagggggcaaaacgatggaagtcatcggggaccgtacctttctcggcatgctccgaagtggcggtatgcaccagcgaggtcgtggccgtgagccatccttgccggtagcgtgcattgaaggcactgatggaagtatatcttgtggggaaaggacattccggcaaactgttgcgcaacttgtttatcaccccgtcctgcgccaacgaaagggtcaaagcttccaaaggacggtagagaacggtcgcggaaatataatattcgtcttgccggtgattttcccgataatatccgttggtatattccttaccctcatccttatatttgttccagccatgattatactttgcttgtgcctgcagactccatcggggcgaaaaatgcttcctataacgtgcctgcacaaaagtattctcatcccaaagcgtttcatcggaaaggggattatagagcgtaaccgcccctggaagtccccgacgggaatagaagtagtaacccttcacatccagttcactgtcatccttgaaagtatgataaagggtagcttcgccctgccaggaatagatgccggtgttattacgtttctcttccgtcacgtattttccattgaccagcgtgaaagggtaattaccgtccgccctcatataagcggcatctaccgccacgcgtgtacggctgcccagtttctgccaccagcgcaacgaggggctgaccatgccgaacgaccctccgcgcacccgtgcctgaaaagcggcattgcgcccgtcatcaaaatgaggtttttccgtctctatgcccagcacaccggccgacgcatacaagcgggcggactgcaacaagtcctccgactgcccgatggcgagcgaaagcatggaaacattgtccagcgaaaaacgcccgatatctatctgccctgcctgacaattgctcaccgccaccccgtcataactgacagctgtatgggctgctcccatattgcgtatggaaaccgttttcagtcctccaatgcctccatagtcctttacattggctccggcaaaacggcgcacagcatctgccatattctgtattcccagctggctgatatcctgccgtgacatcgtctgtatgggtacggcagaagtcactttattgggcgacctgcgtgctgtcactgtcactttctctatctgatgcactttccctgtaatcgtatctcctcccacctcctgggcagagagccggaatatacttgcacccactgaaacagcacagaccagtagtaccttagtccttcctgacatagaataaatgaagattatcttaaaccatttgcgcactgcccactttcctcgaatggacaatttttcgactttgttttgcaggtcttctgactcgttcccggtacatcgccttcccgttctttccgaagaacagtggcacaagtatgatacaccgagcatggaactcacagcagcgggactgttcgggactttcacccgattcccttttcatccgcttctccggatagagaacgcggaacaaaacgtggacaaagataggataaataaaagaagtttcagtaaacaataaaacgaatattaccgttttaacagtcatttttctaactttgtaacataataacccaaaaattgagttgccatgaaatataagttattggttcttgatgtagatgggacgctactcaatgatgaaagagaaatcagtaaaaggacattagccgctctgctaaaggtccagcagatgggagtgcgcatagttttgacatccggtaggccgacttatggactgatgccactggccaaaaccctcgaactcggcaattatagaggggttgttctctcctataacggttgccagataataaaagcacagaacggagaaatattgtttgaacgacgcatcaatccggaaatgctgccttatctggaaaagaaagcccgcaagaacggctttgccatcttcacctaccacgatgataccctcattacggatagtccggacaatgaatatataaagaatgaagccctgctaaacaatttgaagataatcagggaagatgaattctctactgccatagacttcgcgccttgcaagtgcatgctggtgagtgacaaggaaaaagctctgatagggctggaacaacattgggaaaaacgcctggcaggtactctggatgctttccgttccgagccttactttttagaggtggtgccctgcggagtcaataaagcgaatacgttaggcgccctattagagcatttgggagtaacacgggaagaagtcattgccgttggagatggcgtatgcgatgtgaccatgctccaattggccggcatgggggtagctatgggacattcacaagattctgtaaaggtctgtgcagactatgtgaccgcatcgaatgaagaagatggagtggccctggccgtagaaaaactaatattggcagaagtgcgtgcagcagaggtgcctcttgatttactgaacgaacgggcacgacacgcattgatgggaaacttgggcattcaatacacatacgcttcggatgagcgcgtagaagcaaccatgccggtcgactaccgtacccgccaacccttcggcattctgcatggcggtgccacccttgccttggcagaaaccgttgccgggctcggctccatgattatctgcgaacctgatgagattgtcgtgggaatgcaagtcagcggaaatcatatttcttctgcacacgaaggagataccgtaagggcagtaggcactatcctgcacaaaggacgctcatcccatatatggaatgtggacgtatttacttccaccaataaactggtttcctctatacgggtagtgaatagtgtgataaagaaaagataaaataataaaaaaacgatacagacacataacaaatccaagttgtaaaactatttattatattgagatatgtcaatatggagcaagcttataggaatcaagaaaaccgaggatagaaacaatatcatcggctataaaaccacctctgtaccatatagtgcctacaattatgccatagtagatgttgaaataggcttgaaagaccacagaatccatgatataggagccctcaagcatgatgacacgacatttcataaaacctcaaaagaagaactattcattttcttaaacgacatagactacatctgcggacacaatatcgttcaccatgatgctaaatacctgtttacggacaaaatttgccgctggattttagttgatacactttatgtttcgcctttactgttccctgaacacccttaccacaggcttgtgaaagatgataaactgatgagcgaacagatgaacaatccggtgaacgattgcaagaaagcaaaagacttattactggatgaaatagcatgctggcattcattaccaaaagaaaagcgtatactattcgcatcgttgctgaaggacaagaaagaatttgaaggatttctcaatatggtaagtgcggagtatattcataaaggaatacctgaacttattaaagaactttatgccggaaaaatttgccaacatgccgaccttgacatgctcaccaatcaatacccatgcggattggcatacgctttggctctgattgacaccaccgattaccgctccatcactcccggatgggtactttataattatccggaagtggaatttatcgtaaaactcttgcgacacactacttgcaaagaaggctgcgactactgccatacgcaattggatgtgctccataacctaaaaatatttttcggatatgagcgcttccggacatacgaaggcgagccactgcaagaacgtgctgcccaagctgcggtaaaagggaaatcgctactggcgatatttcctaccggcggcggcaaatcacttactttccaattgcccgcactcatggctgggcactccgtgcacgggcttacggtagtcatctcccccttgcagtccttgatgaaagaccaggtagacaaccttgccgacagaggcatcacggatgccgtaaccataaatgggatgttagaccccatcacaagatcactgtccatacaaagagtacaagacggagaagcctcgttgttgtatatctctcccgaaatgctccgttcaaaaacaatcgagaaaatattgatggcgcgccacgttgtaaggtttgtgatagacgaagcgcactgcttttcttcatgggggcaggatttcagggttgactatctctacattggcaaattcatccaaaaataccagcaaaagaaaaaatgcaaaaccccgatacctgtatcctgtttcacggccacggcaaaacagaaagtaatccaagacatctgtgactatttcaagcagacttcggatttgaacttggaattattcgcatcaacggcctcaagaacgaatctgcactattccgtcatacatgtagagaatgacaatgataaatatttaaaactgagagaacttgtagcagaagccgattgtccgacaattgtttacgtatcacgcaccaaacggacaaaggaagtggctgcaaaactgactcgcgacggttacaaggcactccctttcaatgggaaaatggaagccgatgaaaaaattgccaaccaagatgcttttatgaacgatcaggtacacatcattgtggccacatccgcatttggcatgggagtcgacaagaaagatgtcggtcttgtggtacattatgatatttccgattcgctggagaattatgttcaagaagcaggcagagcaggtcgtgatcccggtcttagcgcacgttgttatgtgctttatagtgacaatgatttggacaagcattttatattgctaaaccaaacgaaacttagcattagcgaaatacaacaggtatggaaagccgtcaaagaccttaccaaataccgtatgaaagtcaactgttctgcgttggaaattgcccggcaagcaggatgggatgattcggtatctgacattgagacccgtgtacggacagcattagcagctttggaacaaagcggatacttggtaagaggaaacaatgtacctcatgtatatgccacaggaataacagtaaagaatatggacgaagctagagaacgcatatcaacatcactactttttggcaacgatgaaatagaaaaggcagtccgtatcatcaagtcattgatttctcaaaaacatatcgctaaggctcaggactcggaagcagaatcacgaatcgactatctggcagatattttgggactaagcaaaagagatgttatatctgtagtggagcgcatgcgacaggaaggcatattggcagacagcaaagatatatctgcctatttgcaggatgcaggtgattcggaacgaaagtcgcaaatgctcctcgaacgctttgcaaaacttgaacaatacattctcaaccatattcccgatgagtctttacgaatatcatacaagcaactgaatgagaatgccgtaaacgacggaatcaacacatccaaagaaaaagacattcggacgttactctattttctcaccgtcaagggatatacgcgtaaaaaagaagatgcggcccgtaacatggagataagtcgtcaggcagacatggaatccaccatcaggcgatttgaaaaacgattggaaataagtcgctttgctgtagaatggctatacaaactagcttttgatgcagaaaaaaagaatgtatccgacaaagccatccagttctccatagtagagcttctgaaccgaataaaatcaagttcccaatctctttttggtggacttgatgacattcaattggaagacgtggaggaagcacttctatatttatcgaaaatcggtgcgctaaaacttgaaggcggctttttggtactttacaacgccatgaatatccaaagaataaaagacaataagtcgagatacaagcaagacgattaccgaatgctgaacgaattctacaaactgaaaatccaacaagtgcatattgtgggggaatatgccaatctgatggtgagagattatcatgcagccttgcaatatgttcaagactatttccaaatggactacaagaaatttgtcacaaaatatttcaaaggagacagaacaagcgagatacaacgtaacttgacgccacagaaatacaatcaattgtttggacaattatccaaacggcaaatggaaattatttccgataaggattcacgttgtattgtagttgcggcaggtcccggtagtggaaaaacacgagtgttagtccacaaactggcttcactcctactacttgaagacgtaaaacacgaacagctactgatgctgacattttcaagggcagccgctacggagttcaaacaacgacttatggagttgataggcaatgcagcccattttgtcgaaataaaaacattccactcctattgcttcgatctcctgggacggataggaaatcttgaagattcaaagaatgtcgtttcaaaggcagccgagatgatatgtcaagaagaagtagaaccgaacaaaatcggtaagacagtattggttatagacgaagcccaggacatgggaacagaagaacacgcacttgtaaaggctctgatgaccaacaatgaagaaatgcgtgtgatagcagtgggagacgatgaccaaaacatctatgaattccgaggttccgattctgattatatgtaccggctggcgcaagaaaccggaagtacatttgtcgaaatgaccgagaattaccgcagtgctcgccagccggttgattttgccaacggattcttaaaaactatcaataaaagaataaaaagtacacctatcatctctatgagaaaagagaaaggttgggtggaagtgatacgtcatcattcaacatatatgtatcagccgcttgtcgaaaacttacttcaacacaaggacaaaggcacttcgtgtgtactcacccaaacaaacgaagaggctgtcatcttgatagccctcctgcgaaaacatggtataaacagtaaactgatacaatcaatggacggtttacgtttttggaacatggcggaaatgagatacttcctgaagtatatagacaaacggataaaaacacctctaatcacagaagaactatgggaagaagccaaacatgcaaccttttctatttatgacagaagtctaggtttgatgtatgtgaagcgatgtgtggaacagtttgaacaaaccaacaagacaaaatatttcagtgacttcaaagaatttgcatttgagtcgtcagtggaagacttctgcgacacatcaggcaccgatgttgtggtatcaaccatccacaaggctaaaggcagggaatttgatgacgtatatatgctcatatctgacagctatgtaaaggatatccatctgatgcgtcgatactacgtaggaataactcgtgcaaaaaacagactattcatacatacaaacggcgattgcttcaatcatttaagtgtaaaccaatatctcattgaccaacgacaatatgatatgcctgaagaaattatactacagctctctcacaaagatgtcaatttgagattcttcaaagaacggaagcaagaggtcttagcactgagagggggagattcattaatttacagtgatttctttttgtacagttcatcgaccgataaacctatagcaaaattatcatcaagaatgcagggcacgttatctgaatgggaacaaagaggttataaggtgaaatctgcatctgtacggtttgttgtggcatggaagcccaaagatgcaccaaaagatgaaacggaaacggctgttcttttagcagacttgatactttctttgtaagttaaagcacttgaaattatcatattatcattacctttgtgatacgaataatgcaaatacataacaatacattgataacggaatgctcagcttacgatttcaaggaaatgttggaacataagaaagtgaagtcatggcttaaatccgtgtcggcttttgccaatacggacggtggcagtttgttctatggagtgaatgatgacggcgtaattgtagggttggagaatccacaagccgatgctgattttatcagtgaaatgataaaggcacgacttgacccagtaccagaggtacaacttattccgattgaacacgaaggacatactttgattgaagtgaaagtaaaggcaggaacacttacaccttattattattatcaagacggaacacgtacagcttatacacgagttggcaatgaaagcgtggaatgtaattctcaacaacttctttcattggtattgaaaggtacgcacatgacatgggattcactgcctacccaagtgaatgccagcaaacattctttcatcatccttccaatactttccgtgagcaaacccatcaagaatggaatgacaagtatctggaatcatttggactagtaactcctgacggtaaactgactaatgccggattgttgtttgtggataattgcactgtatttcaatcacgtattttctgtactcgttggactggactctataaggatgatgccatcagttccgtggaacatcgggctaaccttgtattgctcttaaaatatggtatggacttcattaagaactataccatgagcggatgggtaaagatgccaaactatcgcttgaaccttcccgactattccgaccgggccatctttgaaggattggtaaaccaccttatccattgggattacactgtaatgggcggtgaagtgcatatcgacatttacgatgaccgagtagaactagtgttaccaggtgcaatacttgacggtacacagattcaagaccgagatatatacaaagtgccgtccatgcgccgcaaccccgtcattgcggatgtatttacacaattggactacatggagaaacgtggctccggtttacgcaaaatgcgggaacttacggagaagctgcctaatttcctgcaaggcaaagaaccgcaatatcaaacggaagcgatttctttctacaccacattctataatttgaactggggcaaaaacggaagaatacctatggaagaagtagccaacagggtaaacagtacccttgaaaagtaccttgaaaacgaaggaagttcggtggaaaagttcggtgatacgcaagaaagttcggagaaaggttcggagataatccaaaaaggttcggagaaaaagttcggagattcgaaaaacaaatctaaaagtattgggaaaaccgcacaaaagattattgatttcgtcatttccgacccgtcaatgtctacagaaacaatggcctataaaataggaataagctcccgagccgtagaaaaacatatttccaagttacgttctatgggtattttgtctcgtgaaggagcagaccatgatggctattggcgcattattgttaaaccataaactgaataataaaccgatgggaacatctttcataccactcagtgcaataattgccgttttaattatcgcctttttgtttgcctccctaccacatgtaaatcataaaacgcgatacagagtgcttcataacgacttatataatttatcaatttcagatttgggaacataaacatagttaccgatttggcgtgtaggaatagaatgacggcgtatgtgcttaaatacactgcagtcattgatatggaatttctttgcgatctctccgatggtgtaacaatctttgggttcaaaggacaatgcctccttttttctctttctactccctgcctttgttttgaagtgttcatccatatactaccgactaaggcgtatcagacgctgacccaaattgtatgacggtatcaagccttgccgtatcatacgataaagaacgtctttactaattccgtaaatcagcatagcttcctttacggttagataccccttactggatggcattcatctaatcagtacttgacgtatcgcctctttctcttttgcgatttgccttttcttatacgccctcttggaacaagccggacaacaatacttcgacactaatgtgggaggagtaaatattttaccacactcctcgcaacttctttgaatggtgtaatttcctcttggcatattcttctcgttttaaatggtttatatcaatttaagttgtaccttatcgccaaataagacgtgtcgcaaacatgtcgcaaataagagataaaaaagcccatagaaaacacatagcaaccatgaaccccataaacgcaaaaagcgtgcaactcattgagctgcacgcttttgcttattgtttattatctgtttccttatcggaatcatttgacttcctcaaagtcagcatcctgcacattatcgccatgctttgtattatcctgagcaccgccttgttgccctgcattcatatcaggaccagcttgtgcaccaccctgagcaccgctctgggcatacatttcagcacttgcagcctggaatgccgtattcaattcggccatggcagagtctacggtagccaggtcttgagccttatgggcatctttcagcttctgcaaagcagcttcaatcggagccttcttgtcggcagggagcttgtcgccgagttccttcaactgattttcggtttggaaaatcatagaatcggcctggttcagcttgtctactttctcacgctctttcttatctgcttcagcattggcttcggcttcggctttcatcttttcgatttcttccttgctcaaaccgctggaagcttcgatacggatagcttgttccttaccggtagccttatctttggcagacaccttcaagataccgttggcgtcgatatcgaacgttacctcaatctgaggaataccgcgacgtgccggagcaatacctgtcaggttgaactggccgattgacttgttctgcgcagccatcggacgctcaccctgcaatacatggatggtaacctccgtttggttgtcggcagcagtagagaatgtctcgctcttcttgcaggggatggtagtgttggcatcaatcagcttcgtcatcacaccgcccatagtttcgatacccatagaaagcggagtaacatccaacaatacaacgcccttgatttcgtccgtcaaaacggcaccttgcacggcagcacctacggccaccacctcatccggattcacacccttggaaggaactttaccgaagaaatcttctaccaacttctgtactgccggaatacgtgaagaaccacctacaaggattacttcatcgatgtccgcattgttcagaccagcatcgctcatagccttcttacatggctccaaacaagcttgaatcaagttgtgagccagagcctcgaacttggcacgggtcaacgtcttcaccaagtgcttgggcacaccgcctacgggcatgatgtacggcaagttgatttcagtgctggtagaagaggacagctcaatcttagccttctcggcagcttccttcagacgttgcatagccatcgggtcttgagtcaggtcggcaccttcgtcgttcttgaactcctgaaccagccagtcgatgattacctggtcgaaatcgtcaccacccaggtgagtgtcaccgttggttgacaatacttcgaacacaccgccaccgaattcgaggatagagatatcgaatgtaccaccaccaaggtcgaatacggcaaccttcatgtccttgtgagacttgtcaataccgtaagcaagagctgcggcagtcggctcgttcacaatacgcttcacttcaagacctgcaatctgtccggcttcctttgtagcctggcgttgggagtcggagaagtatgcggggacggtaattacggcttctgtcacttcttgtcccagataatcctcggcagtctttttcatcttctgcagaatcattgcagagatttcctgcggagtatagagacgtccgtcgatgtctacacgcggagtattgttgtcaccctttactactttataaggcatgcggccgatttctttctgcacctggtcccagttttcgcccatgaaacgtttgatggagaaaaccgtacgggtggggttcgtgatagcctgacgcttggcaggatcaccgattttacgttcgccaccatcaacaaatgctactactgaaggagtggtgcgcttaccttcactgtttgcaattactacaggttcgttaccttcgaatactgcaacgcaagagtttgttgttcctaagtcaataccaataatttttcccatgatcgttatttttttatttgttattattctgtttcgacgtccgcctcagtggcagacgctaataaaaagacaaacgttgtgccaaattgttcagagcagccgcagatttatacttgtggcagtttatctgtcagtttggcagaattaaaatcattttttctgtcggaaattaccatttgttaatttccattccattcaaaagctctacttttgtcgctcgaatcagagataataaaacatgaacaacattaatcattttccttgcatacctttaaccgttcctccatgaaggaaatattgttccaccgtggagaaaatatcattccaccacgagggaaatatcgttccaccatggtggaacgattaaggattagttaacattgggcttaatcgcagcacggaaatgattgtttttcacatataaagaaataaataagatgagtatggaaaagatgagagacagtatcgacttcaagaacacggacatcaagacattgttccgcaaactattgctccctactgtactggggatgattttctccgcactattcgttatcaccgacggcatctttgtcggaaaaggaattggcagtgatgctttggcggcggtcaacattgtggcaccgctatggttgttctctacgggtgtgggacttatgttcggagtcggtgcctctgtggtggcctccattcatctgtcacacgggaaagtcaaggtggcacgtatcaacatcacacagtctgtagtcatatcttccttgctgctgatgtgtacctccaccctattctgttcatttgccccgcaggtggtaaagctgctcggagggtccgaacggctcacgccattggctgtggaatacatgctttggtttgtgcctttctctctgttcacagcattactcaattcgggtatgttttttctgaggctggacggttcgcccaactttgccatgatgtgcaatgtggtggctgcagttctgaacatcctattggattatctgttcatcttcccctttgactgggggatgttcggtgccgcattggcaagtgctataggcactacggtaggcgcattgatggtagtattctatctactgcgccgccggtgcacactgcgcttccaccccattaagatgagccggaaaagcatgcaactgatgcgccgcaacattggctatatgtgccgcttgggttcttccgccttcttgtgcgaggtggcgattgcctgcatgatgtttgtcggcaaccaggtgttcatccattatctgaaggaagacggagtggcggcattcagcatcgcctgctatttctttcctattatatttatggtatataatgccattgcgcagtcggcacagccgattatcagttataactacggcctgaacgaaaaccaacgtgtccgccgcgcctacttgctggcattgaaaacagccataggctgcggtgtatgttttgccctggtcacaatattctgcagtcctgaaattgtaggcatgttcatagaccgcagttatccggcttatgacatagcggtaaaagggttgcctttgtatgccaccggcttcgtgttctttgctgttaacatcgtatccatcggctatttccagagtgtggagcgtgccaaatacgccacagttatcaccctgctgcgtggttttattctgctgacagcctgctttttcggattgcccctgctattgggagaccggggaatctggcttgccacccctcttgcagaaatgctgacaaccctctttatcctcgtgatttacatatccgggaaaaggaagcataaagaaaaatccgtatctttagacaagacaggctgcaccccgacatgactttttcatgcaagcgtaaaagttatgtcttcagtttgcactatctttgcggcatggaaactatgacaaagaaattctgcaagaagtataaactaccggaaaacactttgcacgaacttctgtcacacatggcagaagttcgtttcagcaagggagaactcattatcagcgaaggggagaggaacagcaatttctatcttttgaagaaaggtatctggcgcgcctactacctgacagagggtacggaaaactccctttggttcgccgcaccgggcgacacagctttctcatcgtggggatatgtggacggcgaagtttcccccatcaacatcgaatcagtgaacgagagcatcgcctattgtatcagtaagcctgagctggaagcccttttttcgtattccatagatatggccaacttcggcagaagaatctttgaacgggaaattctgtcggtagacagttctacagtagcctacggtacccctcccactgccaaagaaaggtacatgacgctgatggaagagaatccggaactgctacaggatgtaccgctcaagtatctggcttcttatctctacatcactccgcaatccctgagccggatacgcgcaggattaaagaaaaagtaaaagactattttatatcaagatacaaaaaaggctcctagcagattatttctgtaagagcctttattatttcaacctatcttgtcagttcttcaccaacaccatcaccaggttattgtcagcatcgtacagcccgatgcctccacctgccagcttaccaaaagactgaacggaattcaaggctttcagcacacggccttccacctccatatcagggcatgccatcatggtactgataacttgcgggaaagagattgccgaaggattttcatcatcaacctggaaagcgccgttaatcaaattgcaacccgcattaccgtgcaagctcttttctgcaatattaaattcaatgaacggctgcttctccattccatcgggaatggcctcgcccgcagcctcactaattatccactttccttccaaatcagacaacttggaaacggattctttcttctgcaacacgactatgggacgattggaagcaccgcataaagctatattttcctttcccagcttcttatactttttcactttgttcaaagccgacaacacattattttctacagtcatatccggacaagccatacgggtacttgctaaagcgccaaggtcaatcgtgccgggcttggcattcacgtcaaacgaacccatcatacggttgcaaccactattgccaaatacttttccagcctttgtgtcgaaaccgatatagggaaattcctggccaggagcagggactacggcggtgccattcacttcaataatattccactcaccgttgatagaagaaagagttgcggcatttttagttgatgcacaagaagacaagcccatcaatacgcttgccatgcatagggaaacaaatacttttttcattttcgttgtttaagttaatttattcgaggggcaaatatatagaaaataacccaaatgcaagtaatttatttaatatttgaagcatttttcccaaagtatttagcaggattttaatgtttatctaagaattaacccttatatttgctctccatattttttataaacttaatataataatatagtagaaagaaatgggtaaagttcttattatcggtgcaggcggtgtaggtaccgttgttgcgcacaaagtggctcaaaatcctgatgtgtttacagaaatcatgatagccagccgcaccaagtctaaatgtgacgctgttgtcaaggcaatcggtaacccgaacatcaaaaccgcccaggtagatgccgacaacgtggacgaactggtagcactcttcaatagtttcaaacccgaaatcgtcatcaacgtagccctcccctaccaagatctcaccatcatggaggcttgtctgcaaagtggagtcaactatctggatactgccaattatgagccgaaagatgttgcccactttgaatacagttggcaatgggcttataagaaacgcttcgaagatgccggactgaccgccatcctcggttgcggtttcgacccgggagtaagtggcatatatacggcatacgccgccaaacatcattttgacgaaatacaatatctagacatcgtagactgtaatgccggaaatcatcataaagcattcgccaccaacttcaatccggaaatcaacatccgtgagattacacagaacggccgctattatgaaaacggagaatgggtaacaaccaagccgctggaaatccacaaagacctgacttatccgaacatcggtctacgcgattcctacctactttatcacgaggaactggagtctctggtaaagaatttccccaccatcaagcgtgcacgcttctggatgacgtttggccaggaatacctcacacacctgcgtgtcatccagaatatcggtatggcccgcatagacgaagtggaatataacggcatgaagattgttccgctgcaattcctgaaagccgtcctccccaacccgcaagacctgggcgaaaactacgaaggcgaaacatccatcggctgccgcatccgcggactaaaggatggcaaagagcgtacttactatgtatataacaactgtagccaccaagaagcctataaggaaaccggcatgcagggcgtaagctataccaccggtgtacctgccatgattggtgccatgatgttcctcaaaggattgtggaaaaagccaggggtatggaatgtcgaggaattcaatccggacccgttcatggaacagctcaacaaacaaggcctgccttggcatgagattatcgacggagacttggaagtttgaaattaatgattaatggttaatgtttaatgattaataccatgcggacaaaaaggtgctccgcccattaatcattaaacattaatcattaaacattaatcactaatcattatccattaatcactaatcattaaacattaacaaagtgaatataggagataaagcacccgaagtattgggcatcaacgaaaaaggtgaagaaatccgcttgagcgactataagggaaagaagattgtactctacttctatcccaaagacatgacatccggctgcacggcacaagcctgcaacctgcgggataattatgccgacctgcgcaaagccggttatgaagtcatcggcgtcagtgtggacagcgaaaagtcacaccagaaatttattgagaaaaacaatctgccttttaccctgattgcagacaccgacaagaagctggtagaacaattcggagtatggggcgaaaaaagcatgtatggccgcaaatatatgggaacgttccgcacaactttcatcattaatgaagaaggtattgtagagcgtatcatcactccgaaagaagtgaagaccaaagaccatgcggcacaaattttataatcattaaacattaacaacgtggcaaaaaaagacgaactgaattttgaaaatggcaacaatctggcatcaggtgaaaagctgaaagccttgcaggctgccatggacaagatagaaaagagctttggcaaaggttctatcatgaaaatgggtgacgaaagtgtcgaacaagtagaagttattcccacagggtccatcggcctcaatgtagctcttggcgtgggaggatatccccgcggacgtatcatcgagatttacggcccggaatcctccggtaagacaaccctcgccattcatgctattgctgaagcgcaaaaggcaggaggcattgccgcattcattgatgcagaacatgctttcgaccgcttctatgcggcaaaactgggtgtggatgtggacaatctgctgatatcacaaccggacaacggcgaacaagcgctggaaatcgcagagcaactgatccgttcttccgctattgacatcattgtagtggactctgtggctgccttaaccccgaaagctgaaattgaaggcgatatgggtgacaacaaggtgggtctgcaagcccgactcatgtcacaagccttgcgtaaactgacggcagctgtcagcaaaacacgcaccacctgcatcttcatcaaccagttgcgcgaaaaaatcggtgtcatgttcggcaatcccgaaacaactaccggtggtaatgccttgaagttctatgcctccgtacgtcttgacatccgtggaagccaagccatcaaaaacggcgatgaagtaatcggcaagcagaccaaagtgaaagttgtaaagaacaaggtagctcctcctttccgtagagcggaattcgacatcatgttcggtgaaggcatctcccgtgcaggcgaaatcattgacttgggtgcagagcttggcatcatcaagaaaagcggctcatggttcagctataacgagacgaaaattgcccagggacgcgacgccgccaagcaggtcatccttgacaatccggaactggcagaagagctggaagggcttatctttgcagaattgagaaaagacaaataacaaaaaaacttgccaatagaatgttttgtttttctattggcaagtttccctaaaagggtaccgcttcctattccattttttccaaacgttcttccaaagcctccatgcttttttcaaaacgtttccaagtatcggcatccatctgttctttcagatacttgttgtctttcagtttagctacattttccagccctttcaatgccagttcttgcgaatgcttcaattctccaagccaatcgcggttcttcagcttctctatctcagcccagtttatatccggaagctgtatattcacattgttaccattccagctggtattctgatacatcatgatattctgtatatccttcaaagtcatatcaccttccagataaacaaatttcagagtagctgcaccatctacaatcataatcagctccttcaccttttcccctttacggctcatgtagaattcagaactggagactgtccctttctgcttcatcagcaattcatatctggaagactgcaccaaagaacgaagatccttacgcatttctttctttacattattatccattgtagaaagtacctgcacagagttcaactgtccggacactttcccaatataaacatctttagtaaacaagttgggattcgtttctatcattgccttggatatgtagacggacgacacgcctttcatatctccatacttgttgaataggttcttctgtgcctggcaaagcaaaggcaacatcagcagtacacctgccaaaataattttcattgttttcatatcagattattgttgaatttcttttcttacttcctggttcaccttcgttacgtctatccgcgtttcctctatctgctcaattcccttgttcagattcgcagacacctcgattaaagtggcctgcaatgccttataagcagcttccggatcagagaaagtgtcctgaggtgtaggaggacgcatatcctctcccatgttcgtaatgccataacctacacctacaagaaccagaatggtggcagcaatacctcctatccagcgccaattacgtttggccttgttccggtggaaaaaacgttgttcctcttcagccttttcatcaatcatccggctcagtttatcctccaatccggcgggaacattatccaccactttcccgggaaaaaagctgagaaagagtttcttgtccttctgcaagtgctcgggcacttcttcggttctgaaagcttccttcaacaactcttcttcctgctcgttggtattcccttcataaaattcggcgagcagcctttcaatttcctcgactttcatagttactccatttattaaattcctcacgtatcttttttcttgcccgggacaacagtacacggacattggtagcattcaatcccgtgacctgctctatctcttcataagaacatcccttgacatcacgcaacgttactatcttctgctgttgcaccggcagatgggcaatgatgtgccttacctgctgcgcttcatcccgcgcttcaaagttatctgcttgagacacattatgcacttcggccaactccacactctgtctgctcaaagtatactttcccgaacgaagcaaatcaaagcacatatttttcaccagagtaacgctgaatgcttccggattactgataatggccagtccttcccgcttgtcccacaacttcagataagcttcctgcaccaaatcttcagcatcggcagcattctccaatagtctataagctatgcagtacaacttgcgatgatatggcagaaactcttttttaaaactttcagcgtccatgggctatttatcaatagtagattcctgtttatatccttcagacgtagggggaaaggattttgttacacgaccaggaaaaaaaatggaaaaaaaatgaaaacaccaatagcaccagcccaagagtgcgtttatttcaagacatcagcaatccgctttttaagattcaattttgcaatgtcttcaggcttcagctcaagctccaccaacaccttcgctgtggagagtctgtattcctgctctaacgtatcataatttatctgttccttatgaatggaatacaacaaagcaaaatcgtagttcaaggcacgtgagacattatacaacgtatccgtatcaatactttttctcgtaagcatatagtctacactttgaggcttaactttcagtcttcgtgcaagttccgccttggtaacctgctgttcaagcatcacgttcttgattatctctccgatgtatatattacttttttccatttatatgaaggtacaaattaatcattcatattataaggaacaccaataccaatttgtctgtatgtatcgttctttttattcataattcgtttgttttatcaaatattttatgatacttttgcaacatattcatataaacaaacaaataatatctgctatcatgaatttactgacatgtattctcatagccatccctatcggcattatttttattatgctatggatatacaatgactaccggaaatataagaagaaaaataagctggccattttgctgtttctcctatttccaaccactttatctgcacaatacgttgatgcaggatgccaagtatcctttaaatggctggagaaccaaaaagggaaattagagtatacaaaagatggggttacttataagtttattccaaacgactcccaatgggaaattgtaattcgcaacaactcttcagaagatatccgaataaactgggaaaatatgcaattcattgtggacggaagaacctcagaagtcaaatacaccatacttgcagaagcggaaactccctttgcaattataaaaagccaggcagaaacaagccaaaagattggtgtgacaacttatacggcaaataactctcaaatatacaacaagaaagatattcgaaaaggaaggaattcctccattaccattatccttcccatatctatcggtaagcaccctcaattcttcacctctttcgactttatcatcaaaaaagtgaactaactatgacttctcaagatataaaaaaacagctgaaagaaccacatttctggaacattgtattaactggtcagcacgccgaaccgagaacaaaagcaatgctggaagcaaaaggtatcataacttggcttccacttgctccggtccggcgtcaatggggaaggatattaaaagaaatacacaccccggttatcccgaaatgtgtattcgtctatatatccaatgaggaaagaaatacgttgcaaaaatcctaccgacttcttccaccggaagttatacttcaagaactgccggacctatgcaatcagaacaagtagatatatgccaacgtgctcacactaatcactatccacaacaaggtgccttgtatcaagggcttgatacctactgccttcagtacatcacgtgacagagaggcaccgataaagaacagagtgatagtcagcgtcttgcgggccaaagaattgattccctccccaatcatggcacccgtttcggtagtacccagcacataagtattgaaaatcatagccagcacaaagaagaagatgaaccagggaatactgattttctgtcccttgctcttaaagatgaacgaagttaccaaagccaaaggaataatccataaggcacgtgtcagctttatagtcgttgccacctgtaatgcctcttccccataggcggcacctgcccccactaccgaactcgtatcatgtatggcaatggccgcccatgtgccgaactcatgctggctcatgttcaaagcgtggcctatcatcggaaaaacaaacaatgcaatggcattcaatataaagatggtgcccaatgccacagacatctcgctatcctttgccttcaacaccggccccacagccgcaatggcactgcctccgcagatagccgtaccggaactgataagataggaagtgtcacggtccactttcaggaacttacgtcctatgagccagcctatgagcaatgtccccactacagaaataatcgtgaactccattccctccttgcccgaagccagagaagcctgcagattcattccaaatcctaaccctacaacagagtattgcaacaggtactttgaagtcttcttattgaacttcggatgtgcctgcccacacagcaacgcaaaggccaaccccaagaacaacgccaacggcggagtgacccatgccgaataggcatgcataccgggcacataatccagcagcagaaagaaggagaggacaaccagaagagatacataaataaatttattattactttgaagaaaaggcatattaatgcttttagccaaaactcgatttgaagccatactgtttattttactattattactaatgtttattccttaattttccggatgcaaaggtagttctattttagtacacccgccaatcgtttctacttatagactataacttattgttatcgggacataaacatatagttcataaaggcttgtgacaaccctccttcctgcccttgcaactggacaaagcagaagtcgcgaagcatgggcatatcctttatctcgaccacgcggaaagtgcctgccgccagttccttgcagatggaacggatagacacgattcccatgcaatcggagttttcaagaaagagcttgatgctttcggtactacccagatacatcagtacatggagtgaggaaagcttgacaccgtgcttctggagtgagcgttctatcacgtccagcgtaccagaaccacgttcacgaagcactaaaggaatagcgggcaaatcctggggagtaatctcttcgggcaattgtaaacggcttttggaatggactaccgctaccagttcatcctcaagaaaagtagtatacttcagattgggaaggcggaaaaccccttccaccaatcccaagtcaatgcggtgttcctgcaaagcggcttctatttcccgggaatttccattgagcaaggacaagttgacctgcggaaacttgccgataaaactgcccagcaacggaggaagcacatactgcgcaatggtagtgctggctcccaacttgagttctccaatatattcgttatgtaacaagtgcatttcatattccagccgtttatagtcctccaatatccgttcgcaatgctccaaaagcagccggcccgactcggtcagactgattttacttccctgccggtcgaaaagcctcgtctggtaagtggcctccagctcctggatatgcttggttatagccggctgactaacaaacaactcttgcgaagcctttgtaaaactcaagttcttggcaacagactgaaacacttttaaacggaaatcactcatatacttcttatatcctataactcgtcagacttgatgccgaaagcatgcgccaaagaataaaacaccggctccaggcggcaatacaccgggctcagaggttcctccgtaatgaaatacacagctttgccccgttcttcttcattcttgtctttgaagaaacccgccagcttttcctccactccattaccatatacctgatggaaaggcaacaacatcaaacacttcacatctgcagaatcaagcgccaggttcatcaggtcaagaaacaactcttcggtagagactaaaccagaagaggtgacggaagaaaatgtaaattcgcccagtggcgtacggcatgcctggtgattcagtctattcacatcggatggttcacaacacttcagcacgtccgctgcaggagtatgcaccaacaacacttctacctcattttcttgttctctcaagccggcatccaatgccagatagctcaaccatgccggcaggtcaacatcgggtagcttccttcccaacttaccttccaaaaagttctttgcaccatataccacttcattcagaaatgcaacatctatcaatatcacatttgccggaaactttatcttatcctccattatctcctatcttaatacataattatacataatgctcctctgcaagcggagctccgaaaacctaccacacagaaagcacaaaactttgaagcagtaaaagtacgacaaatttatcaataacttgtatcatcccaagcaattaatctatatctccgaagcggaaagagaatatccttcccccacaacacggaaaccttggagctggaacacgaagacttagctactaaaacatatagcccctcactacataagatgtgcatctcgtactacatgagatgtacacctcgtactacatgagatgcacatctcatgcatgacatccttatttgcccttctctttaaccaatagagtttaatacgaaaaggaactttgctccaacttcttatctaaagaagtagaaagaaacaaaacgactgatttacagacaatttgtcattttatatattttatatgcagacaatttgtccgaaatgtgccaatggcaaatcttttgcgccttcccaagtgttatgaaactgataaaatagaaaggagaacaaaatatgaactttaacaactttaccattaaagcgcaagaagcagtgcaggaggctgtgaacctggtacaaagccgtggacagcaggccatcgagcccgtgcatgtacttcaaagcgtgatgaaagtaggtgaaaatgtcaccaacttcatcttccagaaactgggcatgaacggtcagcagatagcacttgtactggacaagcaaattgattctctgcccaaggtatccggcggagagccatacctgagccgtgaaacgaacgaagtgttccagaaggccacccaatattccaaggaaatgggtgatgaattcgtctccctggaaccggtactgctggctttgctgaatgtgaaaagcactgcatccaccattctgaaagatgccgggatgacggaacgcgaactgcgggaagccatcaacgaactgcgaaaaggagaaaaagtaacttcacaatccagcgaagacacttaccagtcattggaaaagtacgctatcaatctgaacgaagcagcccgcagcggcaaactggatcccgtcatcggccgtgacgaagagatacggcgtgtcctgcagattctgagccggcgtaccaagaacaacccgattcttatcggtgaaccgggtaccggtaaaacagctatcgtagagggacttgcccaccgtatcttgcgtggagacgtccccgagaacttgaagaacaaacaagtctactccctggatatgggtgcactggtggcgggcgctaaatacaaaggcgaatttgaagaacgcctgaaggccgttatcaacgaagtgaagaagtccgaaggagacatcatcctcttcattgatgaaatccacaccctggtgggtgcaggcaagggcgaaggcgccatggatgccgccaacatcctgaaacccgccctggcacgcggtgaactgaggagcatcggggccactaccctcgatgaatatcagaagtatttcgaaaaggacaaagcgttggagcgccgcttccagattgtcatggtgaacgaaccggacacgctgagcaccatctccattctgcgtggtctgaaggaacgttatgagaaccatcaccatgtacggattaaagacgatgccatcatcgccgccgtagagttgagcaaccgctacatcaccgaccgtttcttaccggacaaggctatcgacttgatggacgaagccgctgccaagctacgtatggaagtcgattccgttccggaagaactggacgaaatctcgcgtaagataaagcagctggaaattgaacgcgaggccatcaagcgcgaaaacgacaagcccaagctggaacaaatcggcaaagaacttgccgagctgaaggagcaggaaaactcgtacaaggcgaaatggcaaagtgaaaagacccttgtcaacaaaatccagcagaataaggtggaaatagagaacctgaagttcgaggccgacaaggcggaacgggaaggcgactatggccgggtggccgaaatccgttacggcaaactgcaagcgctgaaccaggagattgaagaaactcagcaaaaactgcacgaaatgcagggcgacaaggccatgattaaagaggaagtggacgctgaagacattgccgacgtagtatcccgctggaccggcataccggtaagcaagatgctgcaaagcgaaaaggacaaactgttgcatctggaagcggaactgcaccagcgggttatcgggcaggacgaagccatcgaggccgtatccgatgccgtacgccgcagccgtgccggactgcaagacccgaaacgtcctatcggctccttccttttcctgggaaccaccggtgtaggtaagacggaattggcaaaggcactggcggagttcctctttgacgacgagacgatgatgacccgtatcgacatgagcgagtatcaggagaaacacagcgtttcccgtctggtaggagcgcctccgggatatgtgggctacgatgaaggcggacaactgacagaagccgtaaggcggaaaccgtattctgtcgtcctgttcgacgaaatcgagaaagcgcatccggacgtattcaacatcttgctgcaagtgctggatgacggacgtctgacagacaataaaggacgtacggtcaacttcaagaatacgattatcatcatgacctccaacatgggcagcggctatatccaaagccagatggagaagctcaacagtagcaataaggagcaaatcgtagaggaaaccaagaaggaagtgatgaatatgctgaaaaagaccatccgcccggaattcttgaaccgtatcgacgaaaccatcatgttcctgccactgacagagcccgaaatcaaacagattgtaatgctccaaatcaagagtgtgcagaagatgctttccggtaacggtgtggaacttgttctgacaaatgccgccatagacttccttgccaatgcaggttatgaccctgaattcggcgcccgtccggtgaaacgtgccatacagcactatttgctgaacgatttgtcgaagaagttgctgtcccaggaagtagaccgcagcaagcctattacagtggatgccaataccactgacgacggactggttttcagaaattaaaagcaatccgtatccccccaataaaagaggcgattcccgactattgagaatcgcctcttttattttgtatttcaatccttctccgattactcggccttgctttcctccttcgtttctgccgcaggagtttcttcaaaatccgtcataccgcttgccaccagcaaattataccaaacaatcaatttcttgatgtcggacggatatacgcggtcgcgatcgaaggtaggcaatacctctgccaggtaagcacgcaaatcgtcggcagtagccttctttaagtccatcactacggcagcgccgttttcctttttcttcatggaaagaagcacttccttcaaaggaacatcttccgtatctgtatacatggcgatatcgcccaaagaagtaatcttctcattaccataggcaggaaaacgcttcttgtctgcaagcgactctacaatcaacatattttttccctgagaaacaagcttatacaatcccggtttaccggaaatggacaaaatagtcttcaacataatatattctgttttgatgattagtagttattttttcgggaggcaaagataatgtaagccgaagacaatacaaaataagcttgcttatttttattgttaagaagatgcctattttcgtaacagatagtgcattttttcagatagcgaaccgattagctctaaaacttgcggaatcaatggagtttcgccatcatttacaatgacaaaatctgcatatttacgcttttcttcgtcatccatctggctacggatacgcttttctatcaattcgcgcgaggaagcatcccgccagacggcacgtgaaatacgcacctcttcgggcgcatagaccataacaatagcatctacttcacctgcaaaccccgcttcaaccaaaatggccgattctataccgacaatggaagaagcggcgcgacattgtgtccaccgcctgaaatcctcctttacacgaggatgcacaataccgttgattttttgggcatgctccggactgccaaaaagataagacgccaacaaaggcttgttcagtgtaccaccggcatacacttccgcaccaagcaaggcagacaattcctcgcggataaatgaatcggataccatcagctttttcgtttccaagtccgagatatagacgggaacacccagcacttccaacagtctggataccatactctttccgctaccgataccaccggttatacctatcttaatcgccataatcaggagaaatttgctctatcaaaaaatccacctgtgccggattgaagcgcacctggctcacccctttcggcagattcttgatctttaccgtatacttgtcggaacccagacgaagcagttcctcataagacacgtaaatatgaaaatcatcagcgttaatctgcctgaaatgactcagaccaacctgaaacgtgacctgcaccttagaagggaaagcgcgcagcaccttgtcggcaggaaagttaacgccacgcaacggcacctccactgtcttttctgtataaatatccaccggaagcatcatctcaatggaagaaggcacaaacttcacacctttctgaacacgcagggggatttgctgtctcaaggtatccgatatatcttccagcttcaccggttgcgtataggcaacagtaatcgtatccagcacgccttgcggcgcatacaccaatacggaatcgggactgaatatcgtatccgaaagataatactcacgtccggcactcagcgtgccgcgcagcttcaccggcaccagtttggaggctcccgtcgaatagatgtactccaatgtatccggcttcatggaaagcaggcgggtagaagcattcagctggttcagcactttcttttcaaactgcgggggatatatccttacttgattatccacacccgtataatcggcataatcgagaataacaggatagaagctctttcccaacatatagttgagcagtaccgttcccttatcctttaccttgatgcggagttctgaaacaggttcagaagtaatcaccacattattgggtactcccttcagccgcaccggtatagagaagtccgcctcatagtcgttgttcaaggtctgcaagagccagaagccaccggccacaaagaagaaaaacaaaaaaatgaagaactctctgcttttatcgctaagcagaaagtccttcacttctcttgatatcttcagatatgtacgttgtatgttcctacgttcaaacataggctcacatttctattatttagatgcctgactgctattcgcatcagcagctgcagcaaaaatagaattcttgtctatacgaatcttaacgttggaagcgatttcaagcaccacatcattgtcgttgatttccttgataacaccatggatgccaccggctgtgattactttctgattcacttgaagcgatttacggaagtttgcgatttccttttgcttcttgttttgaggacgaatcataaagaaatacataataacgaacatggctatcagcataatccacatcatgctaccaccaccagcaggccctgcaacaggagcttgcaggaagaatacagtcattaagttcataaatactcagttttggtttctattattaaacaaaggtattagtttttcgttaacttaccttctttttttaattgattaactattccgtccaatgtaccgttcacgaagctgccgcttttgaccgtgctgtaaactttggcaatatcgacatattcgtttaacgaaacactcaccggaatgttcgggaaactcaatatttcggccaatgcacactgcatgattacaacatccataaaggctacacggtccaagtcccaattacgcgtattctcactgatgagatgacggtaatagtcacagttcaagatggcacggcggaacaaacggcgtgcaaattcctggtcttcctcatccttaaactctggtaaaagctcctggttggcaccattcttctcttcgaagcgcttgatggttttcagcacgaaagtatccacaatctccttgtcgtcgttccagtaaaggctctggtcttcgagcacactgtccaaggcttcgttgttgaaaacaaaagtcttatacagttttctccacaattcacgatcatattcgtaagaatcgtccgaagaagccatatattccttatatatatctgattccacaattttctcatacaatcccttgacgaagtcttcatcattggcccacgtgcgcttttggttggcgatgaattccgtcaattgtttgttcacttccaactgggctataaacttgttttccacaaatttcatgttgggatacagctcctcggcagtgggagccagcttagcttttgccgcatcaatacgtttttgtgcgtagttcgtcaaagctatcatcagcatcagcaggtagttgtagaggtcgtatgcctttgaaaggctaaagaataattctttctccgctgagtctaaatttttactgccattctgataataagcatatacaatctgtataatcttaagacgaataagaactctgttgatcataattctaaagtaaatactagtgttttaacaaggcgcaaaagtaggcatttttaatgagtttacataaataaatcacattttttaatgcagatattgattatccggtctttttcttttgacagtttaaaaaaaatcgtcaattttgagcccgataaagagctaaaagctacgagatacaagttttaaggtgataatatcaaaattgagacctattataatatggaagactttaagaagaaaaacgcagcggacatgaacgacaaggagattgtattctcccaatccatcaaagcaggtaagcgcatctactatttagacgtcaagaaaaacagaaaagacgaaatgtttctcgccattacggaaagcaagaaaatcgtgatgggcgagggtgacgactcgcaggtaagtttcgaaaagcacaaaatctttctatacaaagaagattttgaaaagttcatgaacggactccagcaggccatcggcttcatccaggagcaacagggtttccacacaagacataccgctgacgacgaggctgaaactcccgaaacacacaaagaagaagtaccacaagaggaaaaagcttgccccctggacggagaaatcaaaatagacattgaattttaagttataaccttttgataattcaaaaagaagctgtatttttgcaccgcttttttgcaacatcgtgtggtaaaccatatcgtgtgatggtgaattaagcaaaaaatttacttaatttagagtaacacaatttttttagaaatgaaatcaattgaagtaaaaggaactgcaagaactattgcagaacgttcttcggaacaagcaagagctttgaaagctattcgtaaaaacaacggtgtaccttgcgtactttatggtgcaggtgaaaatgttcacttcactgtacctgcagaaggtctgcgcaatttggtttatactccgcacatctacgtagttgacttggtgattgatggcaagaaagtaaacgctatcatgaaagatatccaattccaccccgtaaaggataccatcctacacgttgacttctatcaaattgacgaggctaagcctatcgttatggaagttccggtacagatggaaggtttggcagaaggtgttaaggctggtggtaagctggtactccagatgcgtaaactgaaagtaagagctttgtataacgtaattcctgaaagactgactatcaacgttactcacttgggacttggtaagactgttaaagttggcgaattgcaatacgaaggattggaattgctgaatgccaaagaagctgttgtatgcgccgttaagctgactcgtgctgcaagaggtgccgctgctgctgcaggcaactaatcaattctttccaagaaagactaaatattggggaacgcggattaacgcagccaacgcagatttcatactgatttccgcggaaagttgcgataatccgcgttctttttcttactgctctttctcctctgaaaggagaaagagaatagacttgaagcactgacaatgaaatatttaattgtaggattgggcaatatcggccccgaatatcacgaaacccgtcacaacatcggattcatggtagtagatactctggcaaaagcagcaggtgccacttttaccgacggacgttatggcttcaccacaacgctgtcagtcaagggacgccaactattactactgaagccttccaccttcatgaacctcagcggtaacgccgtacgctactggatgcaaaaggaaaacattccattggagaatgtgttggtagtggtagatgaccttgcactgcctttcggtacactgcgcctgaaaggtaagggaagcgatgcgggacataacggccttaagcatattgcagtaacgctgggcacccagaactatgcacgcctgcgttttggaatcggcaatgactttccccgtggcggacagattgactatgtgctgggacattttaccgatgaagattggaaaacaatgggcgagagattggaaacagccggagaaatcatcaaaagtttctgtctggcgggaatagatatcaccatgaatcaatataacaagaaatgaacgaagccagaattgacaaatggatgtgggctgtacgcatcttcaaaacacgtaccatagctgccgaagcctgcaaaaaagggcgcatcagcatcaatggcgcactggcaaaggctgcccgtacggtgaaaccgggagacgtcatccaagtgcgcaagccccccgtcacctattccttcaaagtactgcaacccattgaaaagcgtgtcggcgcaaagttagtagctgaaatgatggagaatgtaacggctccggaacagtatgaactgctggaaatgagccgtgtcagcggtttcgtcaaccgtgccaaaggtactggacggccaacgaaaaaagaccgccggagcctggaagaatttacagaaccggaatttctggatgatttcgactttgaattcgatttcgaggaagagtaaaataagggaaagattatgagcgagagaataattaaatggggattcatcggttgcggagaagtgaccaaatacaaaagcggaccggcatttcagaaaatagagaactccgaagttgtggccgtcatgagtcgaaatggtgacaaggccaagacctacgccaaggaaagagggattcccaaatggtacgacgatgcccaggagctgattgacgacgaagaggtgaacgccgtgtacattgccactcctccttcttcacatgctacgtacgccatcatgtccatgaaggcaggtaaaccggtctacatagagaagccgatggctgttacctacgaagagtgctgccgcatcaaccgcatttccaaagaaacgggtgttccatgttttgttgcgtattaccgccgctatctgccctacttcctaaaggtaaagtcactggtagaggaaggacatattggcaacatcatcaacattcaaatccgattcgcccagcctccccgcgacctcgaccataacaaggaaaacctaccgtggcgcgtgcaaccggatattgccggtggaggatacttctatgaccttgcaccccaccagatagatttgttgcaggaaatcttcggatgtatccttgaagccagcggctacaagagcaaccgtggcggactatatccagccgaggacaccctaagcgcatgtttccagtttgacagcggactggtgggcagcggctcctggtgtttcgtcgcccacgaatctgcccgcgaagatcgtatagaaatcattggagacaaaggcatgatttgtttctccgtgttcacctatgaccccattgcgctgcacacagaaagagggcgtgaggaaatcattgttgaaaatcccacttacgtccagcaaccgcttatccaggcagtggtagaccacctgctaggcaagtcaatctgcagctgtgacggtgaaagcgccactcttaccaactgggtaatggacaaaatactgaacaaactctgattagcgttcatggggtaaatcttaccccatgtcgaaaccttcgcattttcggccgaccagtttgtacacatcgacactctcgcctacaatccataccacatctccctctacaaaaggttcatgcgggtcgggagcatgcaaggtctcccctccccgctccacaccggcaatcagacagtgatatttctcgcgtatccctgcttctttcaaggtcttgttcaggaaaggagactgcccgtccacacagaattggcgtagaatcatttcactcttctctatcacatccgcattcatggcagacaccttatccatctcctgaccgaaaatgctcaattcctcatccgtagcaattacttgtatcttgtcctgcggaaaaagacggacagacgctccaggaatattaatccgtttcttgccccgaaggatagagaccacatggataccgtatttctttccaaaattcagctctgccaatgtcctgcctgcccattccgattcgccgggaatctcaaaatctgtcaggtgcaagtcgcgtgacagcagacgccccgcatactccggtttcttctctcccatatactcggcacgcatgtcgcggtaccgcagattctggaagaatgtcctttctatcattatggactgcttcttcaactgacgggaaagtatcattaaagtcaccagcaacaccgccaccccaaataccagtcccacagacatcttgaataaaccggctataacgaacatgacaaacgaaacacccaacagcaggcgcaatacaatggtagccactaacggcgcccgatttccacggttatccttccataaagtcacaaactcttccgagtgattctttttaatcatgatagcacgcagaaacggagctatacacagaatgatgataaaggcagccaacaaagagccccataccccgggcagactgtcgtgcacgaaaggcaccagaaaacggaacgccaaagctatcaccgccacgcaaatgatggaatatacaaccgtaatcctgaccagtgcaaatatcagtttcttccacagactttcatggttcatggtctgcgaacctgaagcatagcgggtcaagaactttctccatttttccggcaaatgcgtatccacaagattggaagcgggctctgccaaacgaatcatataaggagtaaggaaagtagtgatgacagacaccgccaccacaataggatacaaaaaatggctggtgacatgcagcgacacgcccagcgaagctataataaaagcaaactcaccgatttgcgtcagactgaaaccgcactgcatggccgtcttcagcggttgccccgccagcagcacccccagcgtcccgaagagggattgtccgaaaatgaccgccaaagtaatcacgacaataggtcccgcatactccacaatcatagccgggtctaccatcatgccgaccgatacgaaaaagatggcgccaaacaagtccttgaccggcttcaccaggcgctctatgctctccgcctctaccgtttcggcgagaatggagcccatgataaatgcaccgaaagcagccgaaaatcccgtatgcgcagccatcaccaccataccgaaacagagtccaagagagactatcagcaaagtttcctcgctcatcaacttccggcaccgcttcagcaatccggggatgaggtaaatacccaccacgaaccaaagtatcaggaagaacagcagtttggcaatactctccagcatctccgtaccctcaaagttatggctgactgccatcgtggagagcatcaccatcaatacgatggcaagaatatcctccagaataagcacactgagcaccagacccgtgaactgcttcttgcgcatccccaaatcatcaaacgccttatagataatggtggtggacgacatggcaatcataccgcccagaaatatgcagtccatccgtttccagccgaaaccggtacctaccgccacacccaacaatatcatacaaaagatgatggtacacgcagcaataatcgctgcccctcccaccttcacaatcttcttgaagctgaattccaatcccagtgcaaacaacaggaagataacacctatatccgcccaggtctgtatattagccgtatccatcaccgacggtgtataagccatgtgagggctggcaaggaatcctgcaactacatatcctaataccaatggttgcttcaacttcttaaaaagcagggtcataatccccgcacaaatcaatatcagagctaaatcagctataaggggagccaagtgtgacataattcttcgtctgtatacctttttgttgacaaagatagtgaaaagtttaataagatggaggaacaattcatcctctatttcctttttacaacactcctttcgagcttggcagcccaaagtgataaatatccctcttcaccgccatcttcagcgcacgtgccagcgccttgaagatgccctctatcttatgatgttcgttctgtccttcggcttttacattgagattcatccgggcagcatcgctcaaggatttaaagaagtgcaggaacatttccgtaggcatgtctcctaccttctcgcgcttgaactcggtatcccatacaagccacggacgtccgccaaaatcgagacacacctggcaaagacaatcgtccataggaagagcatagccgtagcgttcaatgcctcgtttgcttcctaaggcttgataaaggcagtcgcccagggcaagggcagtatcttcgatggtgtgatgctcgtccacttcaaggtcacctttcacatggatggtaaggtccataccaccgtgcttgcctatctgttccaacatgtggtcgaagaagcccagtccggtcacgatgtcacaatacccgtcgccatccagattcaaagatacatatatatctgtctccttggtagtgcgacgtacttccgctgtacgctcaccggcaaagaggaattcggccaccttatcccaatccttggtggcgagagcgcagtaatctttaagtccgtcacaagcggcactgccaccttcggagatgggtttcaataaagccatatcatcttgcagaagaatggcgcggcatcccaaattctttgccaactccacatccgtaggccggtcaccgatgacgaaactgtgggacaaatcgtagtccgggttatcaaggtatttggtaagcatcccggtacgcggcttacgggttggtgcattgtcatcgggcatgctgcggtctatgcagatgtcgtcgaaggtgatgccttcgccttccaatgtcttcatcatcaggttgtgtgccggccaaaaggtctcttctggaaaggaagttgtgccgagcccgtcttgattggtcaccatcacaaaatcaaaatccagcttgctgcggatgaagccaagattacgcatcactttcggatagaactccagcttctccagggagtccaactgataatcaatcggcggctcaatgactaaagttccgtcacggtctataaaaagtactttcttcttcataaatgctaaatgctcaaatcgtaagaactttcaacgcttcaatcaatttttcattctcccctctcgttcctaccgtcacccgcaggcaatttccgcagagtgacacggagttacggttgcggacaatgatacccttacctaccagataattgtaaatcttcgcagcatccgtcacacgggccaggaagaaattggcatgagaggggaacatcttcaccgtacatggcagtgcggcgaactcggcttccaggttctcccgctcttctttcagggtcttcacccaacgttctatttcataatagcggtgaagcatttccactgcctgcttctgtgtcaactggttcacgttatagggatattttattttattgaggatgccgataatctccggtgaggcaaatgccatacctagacggatagcagcacatccccatgctttggaaaaggtttgcagcacaatgagattcggatattgattcaaattttcaaggaaggaaggtgcctcggagaagtcattgtatgcctcgtccagtatcaccaacccatcaaaccggcgaatcagcgtttcaatttcgctacggagcaggtcattgccggtaggattgttgggagaacagataaaaatcagtttggtatgctcatccgcagcagccagaagcttgtcggcagagaactggaaatcctcatcgagcagcactttgcggtactccacatcattaacgtcggcacagacttgatacatgccgtaagtagggtcgatggccactacattgtccacacggggttcacaaaaagcacggaacaccaaatcgatagcttcatcactgccattccctaagaagatggaatcgggactcacctttttaattttagacaattcagtctttaactcccgctgcatggggtcgggataacggttgtgcggcatgttataaggattctcgtttgcatcgagaaaaacggatgccgcagcaccattatattcatctcgtgctgaagaataaggcttcagacgccagatattcggacgggtaagttcttgtaatgttttcaccatgttatttatgatttgacaatttacgattaaaattactttaagccatcaactctcaattttcaactttcaattttcatttccattttccaactgccccagtctcacactcacagcattcttatgcgcatccagctgttcattggcagccatcagctcaatggcagggccgatgatattcaatccttccggctttatctcctgaaaagttatcttgcggataaagctgtcgaggctgacaccgctgtatgctttagcatagccgtttgtcggcaaggtatggtttgtgcccgaagcataatctcccgcactctccggagtaagagaacccaagaatacagaaccgacattcacgatacgttctgccacagaaagataatcctcggtttctatgataagatgttcgggagcatacgcgttggtcagttcgatggcttcttccatgctgtccactacaatcagtttgctattggcaagagacttttcggcaatctctttacgtggcagtaaggccagttggcattccacttccacctttacagcttgttgcaattcgacagaggtcgtaattaatatagcttgactgtccactccgtgttctgcctggctcaataagtcggcggcgacaaaaaccggattagctgtttcgtcagccagaacttctacttccgaaggtcctgccggcatatctatcgccacatcacgcaagctcacaaactgtttggcagccgtgacatactgatttcccggaccgaatatcttgtaaactttaggcacactttccgttccgtatgccatagcggcaatggcttgtatgccgccagctttgaaaatccggttgacacctgccacttttgcggcaaacagcacagcgggatgtacctttccgtcacgtcccggaggggtgcagagaacaatttccttgcatccggcaatcctggcgggaacggccagcatcagtaccgtagaaaacagcggagccgttcctccggggatatacaatcccaccttttctatagcaaccgctttctgccagcaggtcacccccggccgagtctgcactttcttgccctcaaagcgttgtgccgcgtggaaagtctcaatgttctgctttgccagtcgaatagctgctttcaagtcttcactcaccaggttttccgcttcctgctgttcctcttccgacacagccagcgaagtcagcaccactttatcaaattttttttcataatccagtacagcacagtctccctccgctttcacacggtcaataacgctccgcaccgtatcaaacagattctccgtattcatcaccggacgtttcagaatctcttgccactggaatttatcgggattactaatcaatatcataatgacatgtttttaaagatttatgcataagccatgatattcttggaggtgtgtcgaggctttaaattatcattttctcaatcggcagcaccagaatgccttccgcccccaacgctttcagctttccaattatctcccagaaacatttctcgtcgagtacggtatgtaccgagcaccagccttcttgcgccaacggcatcaccgtggggctcttcatgcccggaagtacagagacaatctcatccagtttctctttcggggcattcatcagcacatatttcttatcttcggctgtcttcacggcatccatacgaaacaacagctccctcaatatctcttgcttttcctcgctcatgttcttgttgccaatcagtagcgcttccgacttcatcacaacctccacttccttcaaacggttgctcaccagcgtagaaccggaacttacaatatcgaaaatagcatctgccagaccgatgcccggcgccacttctactgaccccgtaatgacgtgtatctccgcattcaccccattctctttcaaaaagccggaaaggatgcccggataagatgtcgcaatcttctttccatgaaaccacttcacccccggatactcaatatccttcggcatggcaagagacagacggcacttgctgaatcccagacgcttgattatctccgcatcctcattcttctcaacaaattcattctcacccacaatgcctatatcagccactccagtagccacagactgcggaatgtcgtcatccctcaaaaacaacacttcaagaggaaagtttgacgactgcaccaacaacgaacgcttcatggcacttaacttaatatccgattctcccaaaaatgacatggtctcgtcataaagacgacctttagcttgtactgcaattcttaacataaggctatttactattttacgatttactattttgaatgagatggcagaaaacaaaacgaggcttaccaatattcggcaagcctcgtcatttatgtcatttgttgtacatatacactcatacgcccaccgagttattcgtcaggatgatgatggtgatgatgtgcaacgatattcttcatatttttttggttttaatgcgacaaaagtaaactaaaagtttgaaacttcaaaagatttatcacaaaaagtttattttttctttcaaattcatcttacttcaccacagattacctaagttcaagcggataatgcaacaggagtgagaatgatgacaatgagaagatacgaaaagaataatttttcagaggaacagagaaagaagatttctttcccttttgttcccctgtggaaaagttgtttctttgcatcttccagttccccaacattcagttgcaatatgaaacagctaaccgaagaacaaaggtataacatttccgcttatctgcaaagcggaaagtcaagaaccgagattgccaatcttgtaggagttcatcgtagcactataagtcgtgaattacgtcgtaatagtgataaacgtaatggcatttacaaaccggatctcgctcaggctaagtatatgtccagaatgcgttcacgaaagcacttcgtgaagtttacggacgacttgaaaattcaagtagatatactcataaagaaagatttcagtccagaacaagtgactgggtttatgcgaacaaagggcttggaaacagtttctcatgagacaatctaccagtatatttgggaagataaaaagcatggagataagttgttatacaagcatttaagaagacggggaagaagtcataagaagagaggtgcattgactaatggacgtggttttatcaaaaaccgcgtggacatagacaagcgtcctacgatagtagacaagaaagtacgttttggtgatttggaaattgacacagtcattggaatgaatcacaaaggagcactattaactataaacgacagggtaactggactagtatggataagactacttagcgggaaagatgccagcccgctaactaaagctgccatcgatgccttggaaccttttagagaccaaatacatacaataacggcagataatggaaaagaatttagttttcacgaagaaattgcacgtaaactaaatatttttgtttactttgcaaaaccataccactcgtgggaaagaggagccaatgaaaacagcaatggtttgattaggcaatacttcccgaagggtacggactttagggacataaccaatgaacaggtaatgcgcgttcaaaacatcttaaactcaagaccgagaaaaagattgggttacatgaccccaaaggaaaaatataaattattaactaacaatgaattcgacactgttgcattgtctgtttgaattcaggttacacagatttgcacagattatttttatttcaatctgtgcaaatctgtgtaatctgtggtaaaacaatcaaatcaacggcaatatttcctcctgctccacttcgcagctatggaaatgcatttccgtttccgctttctctttcgggaaggtgaagtaagtgcaggtagcttccgtacaaagttctcccatgctattgtacagacgtgcttctatgatggcgatattccgcttttgctcccgaagtgaagcccgcagcaccacatgcgtgtcgttggtcgatatggatttgcggaaccgagtctccattttcgatgtcaccccgccagtctgcagcttgcggaacactacccaaccgcagatttcatccagcaatacggactggatgcctccatgcaacgtattcagccatccctgatactccggacgcggcttccagatactcaccacctcgtcaccgtcctcataaaactccattctcacacctgcttcattgtcgggagagcaaccgaaacagttgtacccctccatatctttccacggattgataatcttcttcatatcgtattcttcttttttatctggctctgattcatatattctctcaataaaacgttcaatattagtcattccgattgaaaactacaaattattaatgcctttttcatcgaaaaattagtgggatgctgttctaaaccggttattttatttagctttgtataaatgagagagaacaacaagatgcaaaaaggggtctttttctgcttatggatactatttacattctcattgtttgcgcaaaacaaggagaacggttccgtcacatgcgacagcatcgtacataaaaataccttcgtaaaagcattgaagaaattcctcgacttcagtgacttcgacactacctatatcagtcccaaccgatacaattacgccctgatgctcgaccatttcaccaattacgagtattactccgtgggcaatgacggtcagcggctccgtttttcgcccaacccgcacaacaagataggcgcttacttcggatggcgttggatattcctgggatgggctgtcgatacggactggctctacggaaagaaaagcaagaaaaagcgcggtacggagtttgatctcagtctttacagttccaaactgggagtcgacattttctatcgcagcaccggaaacgactataagatacacaaggtatccggcttttccgacgagattccctccaattattccgaagacttcaacggattgaaagtaaaaatgaagggggtgaatctatattacattttcaacaaccgacgtttctcctatccggctgccttcagccagtccaccaaccagcgccgcaatgcaggttcttttattgccggattctccgtatccacccacaatctgaacttcgactataccaagctgcccaaaataattcagagagccatgaacccgggtatgaaggtgaaacatatcaaatacacgaatatcagcctcaacgccggctatgcctacaattgggtgtttgcccgcaactgcctcgcatgcctatcgttcaatccggctgtcgcctacaagacatcacgcatagagaagacagaagagcgggaagcggacgactggtacaagaatttcaatatcgacttcattctgcgtgcaggtgtggtatacaacaacagcaaatacttcgtgggtacctcattcgtaggacggacatacgactactacaaaaacagtttctccctgaacaacgggttcggcaccctccaaatatatgccggattcaacttttatctgaaaaaggagtaccggaagaacaaaaagtaaaaaaaggctttcagccctcatctcccctcaaaagctataaacacactccacccctactatatctttccgcttatccttctcccactgtctgcaatagaagatgtccgcctcccagcgctcggacaagggcaacgtaatgcctccgcgataacgcatccgctttactccgaagtgctctgtcctattcaaaccattatacatctcggccgaagcatacggctccaccttgcacttcggaatgtcatatgccaccttcgcacgtgagcgcaaacgcaactcgtccgtatgtccatcgaacgtatgctgaaagcgctcacgcaaggacagtttcaccctttgcacacgggcagacagagtgccttccaaacggtagcggtgccggaacttccagccatccgccccccgattgcggtaatgcgtctcatacccggctccaagcttcaggaaaggcaacagcttatagcttccccccaccttcagcccccaccggtctgtctttcccaaatcatcctttgtacgccactccagcccaccggaaacagtaagtgccggcttcaacttatattcgaaaccggcattcgcccaagtggcaaaatccttctcctgcgcccgcagggaaaaagacgaaacaacccatagaactatcggcaaaacaagtactttcgtgcatgaagatatattacttaccatacgcttattctgttaaagtgtcaaaggtaaggataaattctgtaacaattctgtaatactacaaatcttgtctgcacatttccgatttttcaatgatacttaaaaaacagaaaccaagatacaaaaaacaactcaaagttgccatatatgtatggcatcatatatatttgtagcatgaaaaaacacccttataagcgtttcatagattatttattttgggggattcatttatgtgaaatctctttcaaatactcctccacctttccgaagaaggaggtcagatgagaaccgtcgacaaaagcatggttcacatagatggaaagaggaaataccagacgaccttcacgggatacagccttgccggcagtcatcaacggataactgcaaccgttgcctgcttcggcaagtgtataggttatcgaggtgaaatacattttgggaactgcactcagatggaccacatcgtaatcgccttgcccggcaagaatcttttcggctccataagggtcaccgtcctcgggtatgtttgttatcaaggcgtaagcttcggcatagaaacgctcaaagtcttcgtggtagggaatgcgcacggtatagaatgtctttccgggaacagctatcggagaaatgatgtccacccggtcgtgaaaaacaacccggccttccttgtcggtacggtaacggagttcatcgacttcattagccgaacgcaccacagcatacagataataaaggaaaaaggagcgctttgcagcccgggctgcagcactggcttccgtgcagtcaatctctgtagtgacggaataccaggaatttacaaaactgcggaaaaagccgtagttatcccgacgttcccaagcatcaatgtctataatgtgtttcatacaaaaaggggatttagtgaaaaaaggatgcctttttacagagggcactgaaaaaggctctctaaaggcaataaaatgaaaggttcgccaagtccatataattggatttggcgaacttatttttctacttttgaatctaagaatttagcggttacttgccctgtaaagcttaaaaacggccaattaagggctttttagagaacgaaaaggctctcccctcatctgagtttgaggattctcttgatatttgctacaaagataaccatagccccttgcatacgcatacattctattccgtatgaccatgctcggtcataccctaatacattttttaattcggagttcttggcctctatcttatatctcacttttgctttactcctgaactcttccgatttctcaaacgcctcatgctgctgatgctctgatgattttatttgaacagaatatgttttagattttgcgccttctttgtagcatccctctcgccttgaacataacttgcatttatctacatcaaagaaatagaccattgactgattcgttccctgtcctttctttccttgtacagcgcgcctaattgccatatggccagccgggcaaacaaacatgccagcgtctttattgaaatcaaatttatcctcatccttacggaatccattgcttatggctggatttaatcttgcaactagctcaaaaccattctcttcattgttcgataatatgatgttgtctttacctgaataagctgtgtctccaacgactgtttccaccgtcattccgttggcacggctctggtttaccagctcttcaagttgtgggccatcacccttctctcccgaagtcactgtggcggcagtgattatacgctcatcgctcatggcaatatgtgtcttgtagccgaaaaacgagtcatcctcgctcttgtgacccacccgtgcatcttcatcttttgatgtcatataatggtcttcaatatcggcaagtacctccttgagcatattcagccgctctttgaccttgggtatctctgccaatgagggatttgagctaactacatcaagcaatgcctttgtatagtcaagctcatgctcaatgttgtcatccgtgttcttcgaaggcagattgctcttttcggtctcgtcggcatcatatatgcttttgcgcaattgcttcgagcgcaatcttagactctccaagggtgaccaaggattgctgcgtgagccggtatgggtggcatcaactataatcgtgcgagactttattatgcccttttctatagctatgccaacagtcttgccaatcagcaaatccagtagatctttatcttttagacgcaacttgcgaaacttgcataatgagctcggattaatcaaatctgtttcctccggactcatcccaagaaagtatttgaaagacatatcatatcttgatcgttccacaacatcgacatcggatatgtcatagattgttttcaacagaagatatttgaacatccggatgggacattcggccatccttccattgtcttgacaatacttgtcaacgagttcttttttaataaaagaaaagtctatcaaatcatttatctgacgcaataggttgttacgaggaataatcaaatcgtatagatccgaataattactgaactgtatagtctgttgtagtggtagcatatctgtctgattactaccataaagttacaaaaaaatcggcacatactcaagcttttgcctgaatatgtgccgatttttttaggacgctactatatgggggactttttcagtgccctcctttttacaagcatcctttttccgattctatttatttctctttcttataattctccagtccggtctgcagaaattcgatatacttaggtatatcttcgtcgtaggagtaagacttgttaagcggcttaccttcgttgtcaatcaacacatagaagggctgcgcattggcaccgaacttgacacgctgcagataactccacttgtcgcctacggtacgcagcgtacgttccgtgccgttctccacaatcttcacgggagaaggaagcggtgtcttgttgtcgacgtaaagcgtgataagcacatagtcgttgttgataatgtcactcaccttagggtttgtccatacggcaagctccatcttacggcagttcacgcaaccataaccggtgaagtcgagcatcacgggcttgccatgctgacgggcatactccataccgaggtcataatcatcgaacttggcatgcacttcattattgtaaagattgaaatcttgcgtctgcatgggcggcgcaaaagcactgacagctttcagcggagctccccacaaaccgggaatcatatatactgcaaatgccagtgaggccaacgccataaagaaacggggcacactaacctttgaatcgtcatcatcgtgcgggaacttgattttgcccagcaagtagaaaccaagcagtgcaaaaagtacaatccacaaagcaaggaacgtttcacggtcgaggatgcgccaaccgtaagctaaatcggctaccgaaaggaacttcagggcaaaagccagctccaggaagccaagcgtcaccttgatgatattcatccatccaccggatttgggcatggacttcaaccaggacgggaataaggcaaacagcgtgaaaggcaatgccaatgcaatggcaaagcccagcatgccaatagcgggagccaccacactacccgtcgtggaaacctgaaccagcaggaatccgataataggtcccgtgcaggagaaagataccagcgacaaggtaaacgccatcaagaagatactgagcaaaccacttgtcgcctcggctttactgtctacagccgtactccatttggagggcaacgttatttcgaacgctccgaagaaggaagccgcaaacacaaccagcatcaagcagaaaagaatattgaatactgcattcgtagagagtgcgttcagtgcgctggctccgaaaatcagcgtaatggccagcccgagcgtcacataaatcactacgatggaagcaccatacgtccatgcatcacggatgcctttcttcttatccttgctacgcttcaggaagaagctgacagtcatcgggatgatgggccatacacaaggggtgaagagcgctaacagtccgccggcaaatccggtaataaagatataaatccaagacatatcttcctgcgaagtggtttcgcccaaagattgcagttcattgataaccggtttccaaaagttcaccttgtccgtcacattgatttccgtcggtccgtccgcaccaccgacaacagccacagaaaccatgtcggtggcagcctcctgctttgcgggctgttcttcaactttcgtttcaaccgtagctgcagcagcttctttggcagccccttctgcctcaccggagaattggaaaggcacttgtgtgggcggcagacaattttcatcgttgcaagcgccatactccagatatccttccagctgataggcaccacccgtcaattttagcttctgcacaaattgggccgtattttcaaaatagcgtaccttcatttcgaacaacttatcgaaagtagagatttccttgcctacaggcttcagtttgccagccacttccgctccggagattttctccacattgaaagtcgccgagataggaccgccatcgcccaagtcggtggaatagacatgccagcccttgtcaatagcagccgtaaaaacgacctccgcttcatcggcagccaaagtcttcagctcggacttgaacttgactgggtcttgtatctgtgcctgcactgccacagcgaaaagcaacagaaataaagggaacaacaatttcttcatgttctctgatttaatttttaatttttaattttcagttatctcgtagtccacgcaggcacggctctctttcacagcagcgataagcttgccggcagccacgtggtcgggatgggtggcatagtatttcacgtcatccaacgtatcgaactcactgtaaagagcgatactccaagcctcgcctggattgatattcagcccgacttcaatcttgcggataacggatattttagccggaagcgcttcgatagctgccttgaaactgttcattgcagccaacttttcgtcagccggtgcctcatcttttaacttaaataatacaatgtgctttaccataactttgccatttaaatgatttatcactatatttgtcagcctaagcggctgttttaacaactgcaaaaatactggttttgtttcaaatatacacttaaacggatgttaataataggaattgcaggtggaaccggctcaggaaagaccaccgtcgtacgtaaaattatcgaaagcctaccggctggtgaagtggtattattgccacaagactcttactacaaggacagtagccatgtgcccgtggaagaacggcagaacatcaacttcgaccaccccgacgcttttgagtggagccttctttccagacatgtcgccatgctgcgcgaaggaaaaagcatagaacagcccacctactcatacctgacgtgtacacgccagcccgaaaccatccatatcgccccccgggaagtcatcatcatagaaggtatccttgccttgtgcgacaagaaactgcgaagcatgatggacctcaagatatttgtagacgctgaccccgacgaacgcctaattcgtgtaatccagcgtgatgtagtggaacgcggacgcacggcagaagccgttatggaacgctatacacgtatactaaaacccatgcaccagcaattcatagagccctgcaaacgatatgcagacctcattgtaccggaaggcggaaacaaccaggtagccatcgatatattgaccatgtatatcaagaagcacttgggaagttaatttgtaatggagaattgataatggaggattaagaacacactaaatctatgagatatgaacagtttattttctctcgccaaacataaatcatccattatcaattctcccgtctcaattatcttactgttgttgtgctgtatcgcaggatgccgtggaggacatcctgccgaaaaagaagaagcggatgacctgcaacagataaaggacagcggagaactggttgtattgactctgtacagctccacttcctacttcatctaccgtggccaggatatgggattccaatatgagctaagcgagcagtttgccaagagcctgggagtaaagctgagaatagaggtagcccggaatgtgcacgaactcatagagaagttattagcaggcaagggagacctcatcgcctacaacctgcctatcactaaagaatggaaagacagtctgctttattgcggtgaagaggtcatcacgcaccaagtcatcgtgcaacgtaataacggacgtaccaaaccactgaaagacgtgacggaactcatcgggaaaggtgtatatgtaaagccgggaaaatattatgaacggctggtcaatctggacgaagagctcggaggaggtatccacatccataaagtgaccaacgacagtatcagtgcagaagacctcatcacccaagtggcacaagggaaaatcccctataccgtagcagacaatgatgtggcacagcttaatacgacctattaccccaacctgaatatcagactctccatcagctttgaccagcgtgcatcgtgggcagtccggaaagactgtccgcaactggcagccgccgctaacaaatggcatgaggagaatatgacttcacctgcctatacggcaagtatgaaacgatattttgaaatcggcaaggccattccccactctcctatcctctccctgcgcgaaggaaaaatttcccattacgatgatttgttcaagaaatatgctcccaagatagactgggactggcgcctgctggcgtctctggcatatactgagtccaacttcgactccactgccgtatcctgggccggtgccagggggctgatgcaactgatgcctgccacagccagggctatggggctacccgaaggaaaggaacagaaccctgaagagagtataaaggctgccgtgaaatacataggcgccacagccaaaagtttttccaagataccccaggaagaacgcatcaactttgtgctggcatcttataattccggaatcggccatgtgctggatgccatggcactggccgaaaaatacggcaaaaacaaatatgtctggcgtgataatgtagaaaacttcatcctgctaaaaagcaatgaggaatacttcaccgaccccgtctgcaaaaacggctatttccgtggcatcgaaacttataacttcgtaagggatattacgtcacgtttcgagcaatacaagaagaagataaagaataaggattaggggttaacgaattgcgcataatattaggaatatatgccgcaggaatgttaatccctaatccttattttccttccttcttaaaacagattcagtttgttctttctcgcttcttccagggaaacggttgttacttgtttctcccggttcttctcgcacaactgccgatacttctcatgcagttcttcttccagttcctcctttgtctcaggattcatcagtttggctgctactgtagcattctgtgaggcgtccttcagatggattacgggagcatgatagaccggagcaatctttagagcagtgtgaagcggtgaagtcgtggcaccacctatcagcagaggaatgtccaggcctgccttttccaactcaatggctacatgcaccatttcatccagcgaaggggttatcaagccactcaatcctatcatgtctaccttttcctctatggcatgctgtacaatggtttcggcaggcaccatgacgccaaggtccactatatcgtacccgttgcaggccattactaccgagactatattttttccaatgtcgtgcacatcaccttttaccgtagccaacaacacctttccggcagcagttgcaccttcttctttctccgactcgattatgggctggaggatggcaaccgctttcttcatggtgcgtgccgtcttcactacttgcggcaggaacattttgcctgccccaaacaaatcgcctacatgattcatgcccgccatcaacggaccttcaatgatagaaacagctttgggatacagcttcaacgcttcggcaaggtctgcttccagataatcgccgataccctttgtcaaggcgtacttcaaccgctcttccacagaagtctcctctctccaggcaagttgggaatgggcggcagcctgccgctctcctccggaagtttttgccgcctctgcttccgctttcaagcgttcggcagtttctatcaagcgctcggcagcatcgggacgacggttcaagaccacatcctctatgcgctccaatatatcagcgggaatatcggtgtaaagaacggaggtagccggattgacgatacccatatccatgccctcgcggatggcatagtaaaggaatacggcatgcatcgcctcgcgaatgtaattattgccgcggaaagagaaggaaaggttactcactcctccactgacatgcgcaccgggcagattcttgcgtatccatccggtggcacggataaagtctacagcataattgttgtgctcgtccataccggttgccacggcaagtacattcgggtcgaaaattatatcatggggattgaaacctgtcttgtccaccaaaagacggtatgcccgttcgcagacctcaatcttacgttcgtacgtgtctgcctgccctttttcatcaaaagccatcaccacggctgccgcaccatattgcttgatggtacgcgcatgctccaggaatttatcttccccctccttcaaggagatggagttgacgatggacttgccttgcaggcatttcaatccggccacaatcacttcccacttagaggagtctatcatgacgggaacacgggcaatctcaggttccgaagctatcagatggaggaaagtcgtcatctccgcttgagcatccagcagtccgtcgtccatatttatatcaatgacctgcgcaccgtcttccacctgctggcgagcaatgctgagcgcctcgtcatatttcttttcattaatcagacgcaagaatttgcgcgaacccgccacattgcagcgttcacccacattcacgaagttattttccggcttcacttccagaagttcaagcccggaaagccaaagattttccggtctgggaaccggctgatggggcgttgcaccggcaatcagcgaggagtactcggcaatgtaggcatctgtcgttccgcaacaaccaccgataatattcaccaatccctcatggatatactcttttacttcatgtgccatatcggcaggagtctggtcgtatgtgcccaagctgttgggcagtccggcgttgggataagcgctgatataataaggtgcacgggcagcaagctgctccaggaaaggtttcagctggcgggcaccaaaggagcagttcagcccaacggaaaaaatatcggcatgctgcacggaggcgagaaaagcatccaaagtttgtcccgacagagtacgccctccaatatcagaaacagtcacagagagcatcaagggtacatgaactcctacagtttccatcgcctgcccggcggcaaaaatagcagccttggcattcagcgtatcaaaaatggtttctatcagcaaagcatccacaccaccttcgagcaacgcttccatctgctcacggtaggcatcggccagttcatcgtagctcaaggcacgaaaggccggattgttcacatcgggactcatggagcaggtcttgttcgtcggtcctacggagcctgccacaaaacggggtttgtcgggagtaagagaagtaaactcatccgccacttcgcgtgccagacgcactgcggcaagattcatctcacgcacatagtcctgcacatgataatcggccatactgatgcaggtggaactgaatgtatttgtttcgatgatatccgcacctgccgccagatacttgcggtgaatatcttgtatcacatcagggcgtgtcagacaaagcaggtcattgttacctttcatctgtccgggaatctgcgagaagcgttcaccccgaaaatcttcctctgtcaagttgtattgctgtatcatagtgcccattgcaccatccaaaataaggatgcgctcacgcaccaaactaccaagtttactcatattatcttttaaacatacgcgccatatcgcgtttgtcatctttttccttcagtgattcgcgcttatcatattgcttcttacctttggcaagtgccaccacaagtttggccagccctttttcattgataaacaaacgcacgggaacaatggtgaaacccggatctttcgtaccgcgcatcagtttttcaagttccttcttattcaacaaaagcttgcgctccctgcgtgcattgtgattgttgtacgaaccatagaagtattcggccacatgcatgttcttcacccacaattcgccgttggcaaagtaacagaacgtatcgaccaagcttgctttccccaaccggatggacttgatttctgtgcccgtaagcacaatgccagccgtataggtgtctgtcagttcgtagtcgaacgtagcacgcttattctttatatttacaggagcttgtttcataacatttatcagtttagcactaccgtcagcttattgaatatccattcaatgaccaccggacaagctattaacaaaatagaagacagaatggtgaaacgcaaacggtatttttcttctatctgcatcacctttttgcttccttcccacactacatatacaatatagaattggagcaacagagccataatgccgaaattcggcaatatgccgataacaatcttcagcatgaataccacaaccagtgcataacctgcaaactgttgcgccaaagggacatcactgtccagcataaacatgcggacacgcagcccattgatgagataggctgccaaaaaatatcctccgaacaaggatacagccaccgcacagcattgtgtcatggcatattgaaagctttgcggcccatcccatcccatcttcatcaaagaaccgatgaaaacggacaacccgcataaaccaatcataggatagacaaaagcagcaaacacttttcgcctatcctctaaactaatttcctcccaggcacgagccggagaggaaatcagtagtattgctatatgaaataaatctttgtaattcaatatcttatttttcagtttctccctttgtaacagtatacacttcttccttagtttgagaatcgtccaacttcagtgaatatgaatttactttcgtaacaatttcaatagtagtcggattttcagaagtggatgtctgacgtttgtaacgttcaaaaacctttcttaaatcatatactttatagaacaatcccaacccataataaccgccagtatttgcagtcaatgtgtaagatgtgctattagtggatgtcgaatcaccattagaattatggcccaaatataatcttaaagttgttccattatcctcattcgggtaatacactaacgtcaaaaaatgccttttattagtaatataataatttatcggaagtagaagcgtatgatcgtcatagaaaaacttaggagcatattttataccaccagcatcatatcctaacgaaatgatagcagcattattggatttactgatagaatcatttgcagcgactcccttttgttcaactatttccactgtattatctaatgattcaatagagtacaattcaacccccttaacatctttctcatcagcaggtatatctacttgagtaggatcccaacgataatatatctgtgctaccttatcgctcatatcagacattttaaagccattggcctctaaagccgaaattgaggcagatgttggagttatagttacaccgttctcacctttaaaagaataaacacccatatagttctgaactttaaccataccccctccataattgtaagggtcactatccgaattcaaacacgaagtaaacgaaatgcccatcaacaatgtcaaggcaaccaccaagaattttaattgtttcatctttttttctataaatattagagtttgcaaatttagataaaagaattgagtaatatagtactctcctcgttttttcattgtttttaagattaaatgaaagattaatctaaatactgcatatcacagtaacatttaacatttacatcagttaatccacacctacacaatcttggcaaacagctccaaatgttcatccacatagccagcaaccaaagctgtatattcctcctctttttccaaaaattcatcttccagctcatcgaaagcctcatattgctcgtacattgccataaactcctcgtctgtacgttcacgttccaagtcatcacgatggctatcgtatactttcttggcagcataaaccaacttactcaaatcgcccactctccacaaacgcatcactttggcaaacggattgtcgaaaatataaccgccataaccattttgaatcagttggcagaagcctccctccatcacttcatcacggaatatctgataggccaacaatgaatgctgttcaccggtaagcaaaggcatcgtctcggcagtcatttctccgcctatttcttttttataagcatcggtgaatacgccaataaacgcatccatcccttcgccggcagcctggcgcaatgccacatctgtaacttctatcatagtctgaatcttatttgtttctcattgattgaatcgggtggcaaaggtaagaaatgaattgcgaaaaaaggaatcataaggaccaattctgttctgctgcaagcagattcagcatatctaagaggaaaatgtccaaaaactagccgcatactccctgaaaactaagtacggaatcggcacctattattcttaccacagctgttgtaagaaaacaacacagccgttgtaagaaaacgacacagctgttgtaagaaaggaacacaagtgtagtaagaataataagtagggagtttgaggacagttgcaggcactttcccaacaaattaatcctaagttccggcataacatttcagccgcaggatgacagcggataacgcaaactcatttttcaaaatctgctttcgggcgtacaaagcaaaagtctgaaaaacatccgccgaactacaatttcacattattatagaaaaaagtcaaattgaacagttggcagaaacggggaaaacaactaactttgcacccgactaataaaagtagactacgttttttttaaattatatcacttaaaaaagagctaattatgacttattcacacgaagtggaacacatgtgtgttgtgaagaaaggtcctaaccacggaccggctcctattcccgaagaaggtaaatgggtaaaagctaaagaaattgttgacatctctggtctgacacacggcatcggctggtgtgctcctcagcaaggtgcatgtaaattaaccctcaatgtaaaggaaggcgttatccaggaagctttggttgagactatcggttgctccggtatgactcactctgctgctatggcatcagaaatcctcccgggaaagactatcctcgaagcattgaacactgacctcgtttgtgacgctatcaacacagctatgcgcgaactcttcctgcaaatcgtttatggtcgtacccaatctgctttctcggaaggcggtttgatgattggagctggcttggaagacttgggcaaaggtctgcgcagccaggtaggcacattgtacggaacgttggctaagggttctcgttacctggaaatggcagaaggttacatcaagactatcgctttggacaagaacgacgaaatctgcggttacgaatttgttcatctgggcaagtttatggatgaaatcaagaaaggtacagacgccaatgaagcattgaagaaagttaccggtacatacggccgcttcactgaagagcaaggtgcagttaaacacattgacccacgtcacgaataatataaggaggaaagacatatgattagagaagtaaaatttgaaagccaagaccgtcgtatcaagcagattcttgccgcattgaacgcaaacggtatcaaagacatcgaagaagccaatgctatctgcgaagctcatggtctcgatccttataagacttgtgaagaaactcagcccatctgtttcgaaaatgcaaaatgggcatacgttgtaggttgcgccatcgccattaagaagggctgcaagaacgctgctgaagctgctgaagctatcggtatcggtctgcaggcattttgtattccgggttctgtagctgacgaccgcaaggttggtatcggtcatggtaacttggcagccatgttgctgcgtgaagaaaccaagtgtttcgctttcttggcaggtcacgagtcattcgctgctgccgaaggtgctatcaagattgccgctaaagccgacaaggtacgtaaagaacctctgcgttgcatcctgaacggtctcggcaaggacgctgcacagattatctctcgtatcaacggctttacatacgttcagactcaattcgattactatacaggtgaactgaaagtagttcgtgaaatcgcatacagcgacggtccccgtgccaaagtaaaatgctatggtgcagacgatgttcgcgaaggtgtggctatcatgtggaaagagggtgtggatgtatccatcactggtaactctacgaatccgacccgcttccaacacccggttgcaggtacttataagaaagaacgcgtattggctggtaagccgtacttctcagtagcatctggtggtggtactggtcgtactctgcatccggacaacatggctgccggaccggcttcttacggtatgacggacactatgggtcgtatgcactcagacgctcaattcgctggttcttcatcagttcctgctcacgtggaaatgatgggcttcctgggtatcggtaacaacccgatggtaggatgtacagtggcttgtgccgttgacgtggctactgctttgagcaagtaatataatacattactaatatataaatccctgtaactgtaatggttatggggatttttattttagttatactgcaatgcttatcccctatctaatactcatttccttttgttattcttcttataattagctgtgattagataatggaattgaagcaaattatagcttaaatggagcttgaatctctaagggtaaacgtggctgattatccttaaaagtaggctaaattgaagcgctatttgcgaccatattgcgaccattttaccaaatcttgacaagtggtcgcaaaatcagctatattattctaatatacagatagatatatcaaatttaaaggacttccctaatgtctaattttaaatgattaaacattagtgtcccattaaaattgggacgaattaaaaattaaacaaacttggcccatttggtccgaatcgttctttgtcattttgaaatttagttttattaaagaggtctctcagataagtcttatcagtcaatgagatgctcagtatttgtaacacttcatatgtacttctgtccagttgcatatcgtgttgaatgattgccaccaaacagtaagcgcatatagcagcatatatctgtattcgaacagcattctctgtagttccccaaaatcttttgattttaaggtgctgcttgagccatttgaaaaacagctctacctgccagcgatttttataaagttcagcaacttgaagcgcagatatatgcatcgcattggttatgaatataaattctcgttcttgttcttcatcccaatatttaaccagcctaagtggctctgggtaatattgtttaggatagaatcctgtcagaagtacactcgcgtctgaaagcacattcttaggcagcctacgtttccattggatggatttgtacccgagattctttttgctctgacaacaaagtaggcttcaatttgatgaattttatacagcattttgaagttgctataaccgcggtcaaagatgtaataagagcttggttcataaggaatttcaatcatgactttagaatcgtgtacggatgcttccgtgatatgaaagaatgcaggaatctgtgtttccacatcatataatgtatgcactttaataccacctttctttttgcggaattttgcccaccaaaagactgaaaggcacaggtcaatagttgtcgaatcgaaagcataaacgttaccgccaagtttgaaaatatgattagcacacttttgtcgtgcttcgctaactaggtagtaagcatattcttcaaagatgtgatagtctctatcttgatttgctcttgccagcgatgactttgatacatttttacccattcctaaatgataacatttggaatgatgagcttcaagagcaactcattactgtcccattaaaatctaaaagagttctttgaaatatttgaaatttagttagttacagctattctccgagcgaacggacttgaatttgtagctttgcatcagattaatccgatggcatatgttccaagacaaatacgttttcgctcaattggcttcatttctgaatcgaagtaagtttaaccgcatagtcaccaagtatgatggcgataaatatgtgaagcacttcacctgctggaatcaactacttgctttgatatttggccaactttctaatcgtgaaagtctgcgagatttgatagttgctctcatgagtgtactattaaaatgggaacgttattaaaaatcgaataagcttggctcattcaagtctaatcaaccgttctttgtcatattgaaatttagttttgatgaagaggattctgaggagagttttgcctatcaaatgatatactcggaatttgcaaaacttaaagaatatttctgtcgagttgcatgttttttgggacaatagcaactacaagtgacaacataggcagatttatattcttatggtattttcagtagttcccccaaaaaacttaattctgaggggtgcaactagttgaagaaaagttctttccaacggttcttgtaaagttcagctggttgtagagaaaatatgtgcgtctagttggctaaaaacaaattcgcgtttttgttcttgatctcggttccaactaaacggagaggcaatatatagtaccaacccatataaagcattgttgctatgatagttatatccaaatacattattagttaatctccgttcccatctgacaagtctacatgatttttttaccctggcaacgaagaaaactcctatttgacgaatcttatataacatattgaagtttctttaatatctgtactttgcgacagcaatagctgagtaatggctttcatgatgggaaagtgggtacaacatgtctactgaaaatattactgaatccaatccattgattaaattaccagccatacatttgcatatgtcgaaaaaaatgcaaattaaataattatacctttataatttattaaatatcaacagtatatatataagagccttttaagaccttgatttcgccaatgggttaagctattttacttttcaattttgatggaaggttaattaaaccaagtaaaagaaataatagatgaatattataaatctttatctgaaagaacttaccggcttcgaattgaaatataataatgaaggtaaaaaaattccctacttgaatatttcatgtattataatatgggaaactccccgatgagcatagctgacaagattctgctcagaaaaagagcattgattgagacggtcaatgacgaattgaagaacattgcacagatagacacttcagacatcgttctttctgtaattttattgccaattcattgttaactatcgtagcatactgcttttttgagaagcaacccgctattgatgtaaaattcatcaataacaagcaactcactattttctaattttatttcacgttaatttagctaaaaaatcgacagacctaacttttttggttatctttgtgtcaggtatagttcaaactttaacaatatcgtaaactaaaatggacacaggttccataaatgtagatagggtaaaagttgctgtatataatcgaattaaatttgaacttccaataattattagggaagcaattgacacggctttcggcaattactggaatgatgttataggttttggcaattatgtaagttttgaagaaactgtaaattatatagaccatcaatttaaaaaaagaagattatgttttcgtatggtaagttggaacatattgtcaacattatatatgactatattgaaatggctggtggctttttggacgaaggcacattttccattccacgtgcaccactacccgatgaatatttataactaaaataatatgttgaataaggctttagatattgcttacaaggctcattggggtcagacagacaaagctggcactccttacaaacttcaccctacaagggtggcattacattgccaaacagaagatgaaaagattgtggcattgttacacgatgtggtagaagatacctctatgacattggaagaattaaaagcacaagggtttagtaatgaagtgttggctgctttaaagtgtctgacccaaatagaagatgaggactaccaaacattcatccaacgtgtagcaaccaatccacttgccgtaaaagtcaaaatacaagatttgaaagacaatatggatttgtcccgtttggatggtaagccacattggaaaatggaaacatataaaaaagcattggactacctcgaacagtgctcaaataagaaagttctatatgtagacatggataatgtgttggtaaacttccaatctggcatagacgctttaagtgagaagctaaaaaaacaatacgcggggtgctatgatagagtccctaatatattttccaaaatgcaacccaatgaaggggcaatagatgctataaattgtttaaagaacaaatatgacatttacatattatcaacagctccatgggacaacccaagtgcatggtctgataaattggaatgggtaaaacgttatttgggtgaagtatgctataagcgtttaatcttgtcgcatcataaaaacttaaatgcaggtgattacttaatagatgataggaagaagaatggtgctgctaattttaaaggcaagcttatattattcggttctgaacagtttccaaattggaagtctgtagcaaagtatttattgtaacaaaaaataagagccttaagataactgaacatttcccacatggtttctattctattcatccaagccttccgaataatggtgtataatggctatggttacatctcttatcaatagtgttcactgcattccggaagacttttattttttgtagagtgagaaagaaagcctgacccgagtataaagcttatgaaacgctatcttcacagacaatgaggctcttcaagctgtcttcaatctaattaccttacaatatctgtaaagataaggcaaccgaatgagataagcaaatactcatccgaccatcactggcagaacgggcgtgaaatactactcaaacacattgtatccatatattgagatgaaaaactgatggatatgtacaatacataagggcggtcagttaatatgaaacagtttatttcacggagaaacaccaacccagaccgccctttgatacaaattctaaaactatgcctaaagtttcccaccccaataaagaggggtgggaagtaacagtaattcaaattttcttcgcaaattagaggtatccaatcaactgatttaggctcagtagatttttagggatacgcatatagtttagcaatgcggaaaaggaagaaccttttgtcagctatgcctcttaggtttgctctgaatagtttaattttagcattgaaagagtctgccattgcatttgaagagtaagcattcgaagaaatgcaccttttacactttgaggtttggttgtagctttgcggcagtgaatacaatcaaacctcaattattatgaacagacaagaatttgaagaattagaattgcaggtgcaacaaagcgagctgccgttgaagtcgtaccttcaacagataggtgtaagttattcaacctatcactactggcgtagaaaatgttccgttgacaggagcagtatcaaacacgagttggctcctatcagttttaaacaggcatttacggagtcttcccaagaagaacaattgccgcatggtgttgcgctgctgtttcccaatggacttcgtgcccacttcgggagcggttctgaagatttgctgaaggaaatatttacccaaagtcttcgagacggtcatgtttaacctgaacgacacgatgcgctacttcctgtgtcctggcaggacagatatgcgcaagggtatcagttcgctatgcggagtggtacatgagaaaatgaacagtgaagtgaggaacggtgatgtcttcatcttcatcggttccagccgcagactaatgaaactccttcatgccgaagacggaggtatggtaatgtatgtaaaacgtctggaggccggtcgcttcaagctgccggagtatgatcccaaatcaaacagctatcccatggagtggcgcgatctggtgatgatggttgaaggaatacaggaaaacccggaacagaggctccggcggttaagagccgaacgtaaggaataccatgtataacatgttttttgcgtgagtaaactttggatattgttgcataattcactgttaattagtatatttacatcattaaaagaagtatagacaatggaagaaaaagaaattttactcaagacgatagaagggctgaatgcctctatagcctcattgtctactactaataagaatcaatccgaacagataaaaaatctgcaggaacgtatcaaggagttgacggctcaggtcgcatggctgaaccgtcagctctttggtcgtaaatcagagaaacttcgcgtatatgatcctaatatgccagacctctttgccgacgagttttccggactccggcagcaggcggaagaaaagcgggacgaggctgtggaaaagattgagaaggaatcggtggaagacgtaaaacgaaatcgtcagaaccgcaaaatgatagaggacttgcccgtattggaaaccgatacaatagaaccgaaaggcgtagacttgtctttataccgtagaataggcgaagagataacaaaagtcgtcaaacacaagccgggaatgctttacgtcaaggtgatcatccgtcccaaatatgctctcaaggatagtaccctgcttcctccagccggacagaaaggcgtagagatagctcccatgccgctgatgccggtcgacaagtgcattgctgacaccagcctgcttaccgagatactgcttcagaagtatgaatatcatgtcccgttctaccgtcagatacagcaataccgccatcttggaatgaaaggccttaccgaaagtacactggacggctggttcaagaaaaccgtggaactgcttaagcctctgtatgaagaactcaaatgggaagtcttctcctgtgactatgtacaggcggatgaaactacagttccggtcattaacagagaaaaacacagagccgacaaggaatatctctggatggtaagatcagtcatggagaaactggtcatcttccattacgacgggggatcacgggccggagcggtcatcgaatccctggcaaatcaatataacttcaagggatatcttcaatgtgacggttttgcaggttatgaaacagccttcaagaccaaccccgacgtgcggctactcaactgcctggtgcatatacgccgtcattttgagcaggctttggatgaaaacagggagatggcgcaacatgcactgactcagatacagcatgtctataaaatagaacgccagtgtgacgaagccggcctgtcatatgatgagcgcagacagacgcgtcaggaactgtccaggccaatcatggaggcaatgaaggtatggatggagacagaaggaattaaatacagtccaagttctttgacaggcaaggccataacatatgcctataccaaatgggataatattatgagatgtctggacgatggccgcctgtactgggacaacaatctggcggaaaatgtccaacggcccatcactctgagcagaaaaaattttcttttctgtggtaatcacgaagctgcggttaatatgtctgtcatatgttctctgctggccacatgtaaggcgcacggggtaaatcccagggtatacctgaacgatgttatcgcacaaatgccttatcacaaaaaggcaacccaagaagaacttttgaatctacttccacataaatggaagttgaaacatccggaatgtgtactgacaaggcaaaaggaggaatcttgtaactgatataaattgtaacatatgggttcaacaaaacaatagcggctgatactattaggttcatagtgacagtcgctattgttgtatataaaggtttaatacctgtagttggccgaatacttactttgaagagcgatggttgtagaaattcatagtgttcataaaaagtagcagcaatgacgttaaaggaatgtatccctgcttcttccactttactataccaccctgccatagctagacgtgcagcatcctttatggtattctttgagaataccattctcaaggaatggcacaaaccatacgcctttttaatgtcagggtattcttcgaatagtattgccgccctttgtttctgcctctctgtccatttatcagctgatttgaaaagtaaataccgcgagcgtataagcaattccctacgagtatcaccattggaatattggtatgggacataatcttcgttcttctgtttagcttcctccatttcctcattgacctgctgtatggcatcccaacggtatttgatgcgtaattcctgcacggcatcataagctaatttctgaatgtgaaaacggtctataacacggctggatttaggaaatgcagtccgtacaatcttgcgcatgaagtctgaaaggtcaagtgtcacttctttaacggcataacgactttcttcgtcaattcgctgaagcaaagctattacatcctctgatttggtacctgccacaactgctacaagagaacactcccttgtacaggcatcgcgatttgtcacaaaggtgtaaagttcaccgtttgagagcgatgtttcgtcaattgccagacgcggtcccatattctcaggaaacagcatctattcatcggcatgagataactgttcccaattacgatatccgctgagggcctccttgtactgtttttcgaatgtatgaccatctatatgatagaattcctcaagcgtacggcaggtcactggggatgtctccatacgtttcttttaaaaaagccccaaattctttggagtatctggttcccttggccacaacgccgaggtagatgggaatgctgaaacttttacctgtgcgcaagtccgtccaacgccgacatctgatcttgaggattaccttatggtcccgcataggaaagtccgtcacattcacagcttccataaaacctttggactcaaaatgtacgtcattgcttaacttgggattcatcttttcatccagactgatatgaatctcttgagaggtttgttcgactccagagatgaaaaagtaatctaatatctgagccggcaacacgaggctggctagcatgttcaaataatcgtttttcataatgcgaagtaagcaatacttcatgagtataaaaaataatccccactaaaaatctactgagccctgatttacaatgggaaataagaatactgttatagatgcagaaatagctaatttgaacgaacttaccaaggctttgttttatccgttaaaagacaagcccaagaacaacttttagtcatcatgcaggcgtggagcatcggtaaaatcgttcgtaatctcaagtttgaaaaggttcaaggctatactttgacttccctcttcatcacgttcgtcatcgtgcgcttgtgaggaaaaacgattgccagtgcaacctccaatcattttcagggactttgcactgtttccaagaacatgttataccgcacgctattgaacgctcgcatcgactggcggatattccttaccaaaatcaccctgcgcttccataccatctttcaggagcatcaggtagatactgacgaaaatgacacttgtgccatccttgatgatacggcctttcaaaagagcggtgtccgaatcgaagctgtcagcaaggtgttcggccatgtcacccacagtttcatttatggaataaaatgcctaacgctcgccctctctgacggaaaaagctgctatcccatagacttttcccttcatcgggaaaaagggaagaataagaattccggtttgactctaaagcagcggaaggagcagttcaaggaaaagcggaacataaaaaatccggactatgcacgcaaggtggaatgtaatgagagcaagctcgaaatggccaagcgaatgcttcgtcattcagttaaacatggcattaactccaagtatgtgcttgctgacagttggtttacatgcgaatcgtacattcatactgtacgtgagttatgtggcggcgcgatacactatatcggtttagccacgatgaatcctaagttgcgttatcagacaaataagtccaaacgtccccagaacatccatgaattgatttaaggtatgaacgcactgctttctgctattgcagaaagtacaagtgcaaatacattcagcttcatgtaaagatggacgaagaacccgtacgcatcttcatcatcaaatacggacgaagcacccatcggaaagtgctactcacaacagacacctccatgcactccgtcagggcctttgaactgtatgaaagacgttggggcatagaggtcatattcaaggaatgccgtggatatttaggtatttgaaaaaatagaatttatggagaaaatttcaatggcttttggttctacaataccgaggttattcaattaccatccaaagaaaatataaacgaaccccatgccaatatctacccttcctggccgtgcgaagtaagtattcggccaactacaggtattaaacctttatatacaacaatagcgactgtcactatgaacctaatagtatcagccgctattgttttgttgaacccatatgttacaatttatatcagttacaagattcctccttttgccttgtcagtacacattccggatgtttcaacttccatttatgtggaagtagattcaaaagttcttcttgggttgcctttttgtgataaggcatttgtgcgataacatcgttcaggtataccctgggatttaccccgtgcgccttacatgtggccagcagagaacatatgacagacatattaaccgcagcttcgtgattaccacagaaaagaaaattttttctgctcagagtgatgggccgttggacattttccgccagattgttgtcccagtacaggcggccatcgtccagacatctcataatattatcccatttggtataggcatatgttatggccttgcctgtcaaagaacttggactgtatttaattccttctgtctccatccataccttcattgcctccatgattggcctggacagttcctgacgcgtctgtctgcgctcatcatatgacaggccggcttcgtcacactggcgttctattttatagacatgctgtatctgagtcagtgcatgttgcgccatctccctgttttcatccaaagcctgctcaaaatgacggcgtatatgcaccaggcagttgagtagccgcacgtcggggttggtcttgaaggctgtttcataacctgcaaaaccgtcacattgaagatatcccttgaagttatattgatttgccagggattcgatgaccgctccggcccgtgatcccccgtcgtaatggaagatgaccagtttctccatgactgatcttaccatccagagatattccttgtcggctctgtgtttttctctgttaatgaccggaactgtagtttcatccgcctgtacatagtcacaggagaagacttcccatttgagttcttcatacagaggcttaagcagttccacggttttcttgaaccagccgtccagtgtactttcggtaaggcctttcattccaagatggcggtattgctgtatctgacggtagaacgggacatgatattcatacttctgaagcagtatctcggtaagcaggctggtgtcagcaatgcacttgtcgaccggcatcagcggcatgggagctatctctacgcctttctgtccggctggaggaagcagggtactatccttgagagcatatttgggacggatgatcaccttgacgtaaagcattcccggcttgtgtttgacgacttttgttatctcttcgcctattctacggtataaagacaagtctacgcctttcggttctattgtatcggtttccaatacgggcaagtcctctatcattttgcggttctgacgatttcgttttacgtcttccaccgattccttctcaatcttttccacagcctcgtcccgcttttcttccgcctgctgccggagtccggaaaactcgtcggcaaagaggtctggcatattaggatcatatacgcgaagtttctctgatttacgaccaaagagctgacggttcagccatgcgacctgagccgtcaactccttgatacgttcctgcagattttttatctgttcggattgattcttattagtagtagacaatgaggctatagaggcattcagcccttctatcgtcttgagtaaaatttctttttcttccattgtctatacttcttttaatgatgtaaatatactaattaacagtgaattatgcaacaatatccaaagtttactcacgcaaaaaacatgttatacatggtattccttacgttcggctcttaaccgccggagcctctgttccgggttttcctgtattccttcaaccatcatcaccagatcgcgccactccatgggatagctgtttgatttgggatcatactccggcagcttgaagcgaccggcctccaaacgttttacatacattaccatacctccgtcttcggcatgaaggagtttcattagtctgcggctggaaccgatgaagatgaagacatcaccgttcctcacttcactgttcattttctcatgtaccactccgcatagcgaactgatacccttgcgcatatctgtcctgccaggacacaggaagtagcgcatcgtgtcgttcaggttaaacatgaccgtctcgaagactttgggtaaatatttccttcagcaaatcttcagaaccgctcccgaagtgggcacgaagtccattgggaaacagcagcgcaacaccatgcggcaattgttcttcttgggaagactccgtaaatgcctgtttaaaactgataggagccaactcgtgtttgatactgctcctgtcaacggaacattttctacgccagtagtgataggttgaataacttacacctatctgttgaaggtacgacttcaacggcagctcgctttgttgcacctgcaattctaattcttcaaattcttgtctgttcataataattgaggtttgattgtattcactgccgcaaagctacaaccaaacctcaaagtgtaaaaggtgcatttcttcgaatgcttaccgtgcgaaatgattcaacccgaacaaagatctgagcaaaaaccgaaaccttgagaaaaagaagcaattcccttaccacaccacataacagccaaacgggacacataccacaaaggtacatgtcccgtttttaattgtaacaattgtaacgtaacggctggtagcggcaaagaaactgatcagaaataaaccccaaaaggtgtgtcacaatgacaacataacacaccttttattgattaatacatctgattatttttctgtatagcgtcgtatgatagctccgcccattggttggatgggtctgttatcccacagatcaccgaagacattcattgagtgaactgttccattataagaagaacgagtttgaagttgcggcttctctccattttttatccacgtcaaagcaatgtagcctaactggtcttccatcgtaccaaattcacccgggtaaatggcagaatcatcaatttcaacatcgggaacaaatcctgatgcataatctccaaaacctttagcatttttaatgtagaagctgacagggtatagataaaagtcatagttatagaaactacgtaccacaccttccatacctacattctttccattcgttctttgaccgataagattaacttctaaacctaatccacggagaccattgattaccatttcactggcagaagccgttgtctgactagtcaaaacatagacagtttttagtcccacagcatgttgaagtgctatttccaacggttcataaacgcgttctacagtttccttgacaccaattttataatctcctccttcccctgcattggtacggtcttcgttaaattgagtatgtgcatatacctgacctttataatcagcaccgacaattagggtacccatcatagcactagaaagcacatcaccaccattattataacgtaagtcaaggattaaatcagtgacatgctgctggcggaaatattcaaaggcggccatcaaatcttcatcaaagtttatattgaatcccatatagagtaaataacctacttttttaccggtaccttccatttctactaccttatgctgatagatagccggatctataaaggttgctgagcccaactgcaaagtgcctttcggcatgagtatgggcgtagacccattgtcctcccattttacacgattcacagtaacgctcacattaccattatatataagttctcccaacgctttataattagcatcagtaacagctgtaccgtctacttcagtaataaagtctccgcgtactaaacctatctgatctgccggagtacctggagtaaccgccataacggcatatccgataaagtctgcaccaagacgagtggcttggagcaaatatacacctgaaccatattgctcttggcctactacccgggtggtaggagcatcgctttttaaggtagaataataatacatacgttttttaccttcccaaaaaccatcatcgtggttgatctcatcttggtcagataccccgtctaatatactttggaagaattgatcgtagttgatactgtagtctaagaacagattatcaatcggacgattccacaaataattctgcttcatataagcggctacccattcattaacagtacggtactttccatcaccttgttctatggagccctctttttgtttgacgttaaatgaaacagaattagcaaaacctgatacttgaagggttatggtcgctacacgggctgccgtttcttcgtttttttctatagttaatcgcagtaaagattctcccgctacacccgacggagtcttcacaacgcaccattcagcagaactactggctgtccattcagcctctgccataaattcaaaatctatagtttccccttctataatggcttcattttcattttcccataaagcctctgagactcctgtgccttgaatcaattcatcatcgtcactgcatgatgtcatagtaaaagttagcatgagcataactatcagcaccctgttaaatatctttttcatgactaatctatttttagttatttatatctttgttctacggccattctacgtttatctgccatagaaatattatctaatgtcaatacaacgtgctgcggcaccataatgtgatctacagtttttgtggtaggcattacagctccttgattagtatcacgtgttaagatgatttcatctgaggctgcaaaagtcatatcaccccaccattggcttgaacctgccagaacaccaggataatattcaaacgaattatcaacagctttcttgatagttatggtaaggtcatcgcttacttctatcggaaaacttagggtcatatcagtgaattgatcactgttaggacgtttagcaaatccatgaaaatatatttcgtgcccgttgaactttgccatagcataatccagttcaccatttacaggagcacttgttgaaatggcattgcctttattaaattcgataaaccatttgggaccataattggcatcagcttcgtcttgagatgatgcccatccgttggctaacaaagtttccggagaggcatactctacaccactcggagcaaatcctaatacaaccagacgattcttatcatgatatgccttttcggtagtttcgtttacccctgtggctataacaacagggaaggttacattctggcccgtaacatctttagtagtagcagtatatttcccaggaagtttagcccggactccattaccatcatactgaggcaatgtggctgttgtaaagtcgtgtactacagaaacacctacgccttcttcattggcggcatagatgccaaattcatattcggtattttgcgacaaattgtcactgctttcgagcagtaaaccttctgctgtcatagctgccgctacttgttctggcgtcaacgatgaaccattattggctatgacatcgccagcagtcaaagattcattacccggacggctaagtacttcattaatagatcctctcgggaagattccagctaccatggaaacggtatgagtagtcttgatgcggaaagcagccttgttccagggtgtttctaccgattccggcgttgcgctcagttccggcagcggacctataggctcaccggttctaaaatcatacagcagtaatttttcacggttgtctttatcaaatcctacaattcctacctgataatcagtattcggctttaatccctttgcattgaccacgatggatcctatgccttcgttgcttgtttcactccaaggtcctataatcatacggcgtacagaagcttcgccttcaaatgacatatagtcaaattcggcttttgtatttacatgatatcggaaacgttcgataccagcttctggtataacctaagttcaagcggataatgcaacaggagtgagaatgatgacaatgagaagatacgaaaagaataatttttcagaggaacagagaaagaagatttctttcccttttgttcccctgtggaaaagttgtttctttgcatcttccagttccccaacattcagttgcaatatgaaacagctaaccgaagaacaaaggtataacatttccgcttatctgcaaagcggaaagtcaagaaccgagattgccaatcttgtaggagttcatcgtagcactataagtcgtgaattacgtcgtaatagtgataaacgtaatggcatttacaaaccggatctcgctcaggctaagtatatgtccagaatgcgttcacgaaagcacttcgtgaagtttacggacgacttgaaaattcaagtagatatactcataaagaaagatttcagtccagaacaagtgactgggtttatgcgaacaaagggcttggaaacagtttctcatgagacaatctaccagtatatttgggaagataaaaagcatggagataagttgttatacaagcatttaagaagacggggaagaagtcataagaagagaggtgcattgactaatggacgtggttttatcaaaaaccgcgtggacatagacaagcgtcctacgatagtagacaagaaagtacgttttggtgatttggaaattgacacagtcattggaatgaatcacaaaggagcactattaactataaacgacagggtaactggactagtatggataagactacttagcgggaaagatgccagcccgctaactaaagctgccatcgatgccttggaaccttttagagaccaaatacatacaataacggcagataatggaaaagaatttagttttcacgaagaaattgcacgtaaactaaatatttttgtttactttgcaaaaccataccactcgtgggaaagaggagccaatgaaaacagcaatggtttgattaggcaatacttcccgaagggtacggactttagggacataaccaatgaacaggtaatgcgcgttcaaaacatcttaaactcaagaccgagaaaaagattgggttacatgaccccaaaggaaaaatataaattattaactaacaatgaattcgacactgttgcattgtctgtttgaattcaggtaatattaatatctgctgtcatagaagttatgttcttgaccatgacttctatgttgtaaggagccttccccgctttttttgttttaaagaccagagtctttacagccttttcatcaaccgttccttcttcgttgagttcaccggcaatcacgataaactccatatctgaataaatatcttggcggaatcccgaagcatcaagaaatgtagtatcaaataagtaagttttatcttcagtggcttctgtcccaaaagcattaacgtaggaagtgggagtaccacctactaagttgatgatataatcaaaatctgatttagaaagacagacatgtttgtatttagcagcaccttctggcttcatgatatgataggaaaatgaagtggttcctacgctttccaacgaaatcatgccactatatggtttatgggtatctatgggctgagaaagaatttcactataaacgaaaggattaatggttctgacagctgcataaagcatatagttagagtcgcctgttaaatcagtaagagtaattttggccgtttgggaatccttttcaaatatacctgctgtgccctctttgaagagcgtctttgcatctgctattttttctgcatcaggtaatattacataggcataatccgttgcatcgcttgacgaaatggaaaaggatgcggtagttctggttacatcactgacctcgagatttattgagggagggattgaagtaactactttactttcgtcatcgtcactgcatcccagtaaacccatcaaggacataagtacaaatccgaccatgcccccaaaataataagatgtgcgcataattaaaaaaatctattaaaaacataaaaaaaacaatatcattacaacggataataaatgataaatcggcacggcaccggctgttcttctttcaaccagcctgtgacagatattcagtataatttctgtagcactcatattttagtaattcaataatgcaaagatatataattttagacaataaaagcaaaagaaggtgggaaagttgtcaactatgtctgaaaattaggatattcagacgagacatacaaatgatatcctcaaaaatcatacaaaaaactcccatcctatcatcactgaccagacgagagattggatttattattggggatatgttatcatggctaaacaaaggtaagggatatgtcaggcttccggttatgctggcgtgataaaaacagcctgctatgggataccctccacaaaatccttcagccaatataaccggatgatgactaaattgtataaagggttgggataatataagttcccaattatatactttaatgcactaataacacaaaataaaaaccgcacccaaattcaaacttagatgcggtttttatttatctatattcaacttatactatcttatatcacaatttcattatataaaccaaagtatagttacagtatcattaccgccagtatcaccaacattaaatgtacttccaccgcatataaactttccaattaaattagtgacccatcacataatgcccatccatttggtatagaactacctttaaaggctataatcatacctgatacaaatcgggcaaatacgtcttctatatcagcttttgtaggacattcatttgacgccaaatcattccatgccatattatacctcctttctcaaaaacaattcaacactgtgggtggttttcgtcactaaattaaatgagggcagaaatattagggaactttctttatacatataaatctatattttagtattgatttataatatgtcactactgtccactaaaaatggacaaggttaaaaattaaataaattcggttcacttgaatcatattggtctttggcatttttgaaattcgatttgtcgaacaagtcactaagatgtgttttgtcagttagagagattccgagaatttggagaacttcataggcgctgcgttctaatttcatatcgtgttgtactattgctactaagcagtaagtaattatctcacaatagatttgtatgaatactgcgttttctgatgtttcccaaaacttcttaatcctcaggtgttgttttatccatttaaagaatagttcaacactccatctgtttcgataaagcgatgatactaactccgcagatgcgtcaagattgttcgtcaggaagatgtatcgtgtaccgtcttcaggattctcaatgatgagttttctaagtttctcggggtaatccttagaacttttataaaccgtaaagcatccgattacatttacacaaaatattttatagtgccgacgctcagttcgctggttcttcatcagttcctgctcacctagaaatgataggattcctcggcattggtaacaacccgatagtaggatgtacagtggcttgtgcagttgacgtagctcaggctttaagtagataatcatctgatacacagattacgacaaagatctctccttagggaaggctcttcttgttttaacagacttccacgctatccttgctctactcacctatacccatcatcctttagcatcatcaccttatcaattgtgacgatgccctatattatactctataaattgccacattatcgctaattctgtgacatacttgtgacggggtatctataccgtcacaacaaagtaaaacattcataagtcactattgtatcaactcatatcaaaatcatattaaacacctcctatcttatattattaatggcatgtaatgaaattacttcaatcatacaactttatttactttacacctctaccttcaaattcaagaacatttagtttacattagtttcccttctgcaatatggttaacttcgtatcagattaattcaattatcaattatcaaactgcttgttgttcttgaggtttccaaatacggcttccacatcctgcagtcgctgattgcgatatttaaggccttccggcgatatgaacttttcacgttctatttccttgatttttctcagacggtgattcacctgtactatcctttccgagcggcttctgtgacaccggcatcttaacgggcagcccttacagttagataccctgtatcttggtctacacaaaaccgctgcctgttatccaccttgcatcggagagtctttccattctctgtcccatcggacaatacatgccgtcggtttcttcattataataaaagtaacttcagaaacggattgtttctgaagttacttttctgttctttatgaaaataattgtactttacgaagcatgcaatgccatgtctgaaagcatacagatagttctcttcacttccgtatccggcatcacagacagatacgtcaagatatctgccataaagggagaggataggtggaagtatcacccacacactgatggagagttatagcccaaaatgaactggttattggtactgatctgggaattatatccggagttgaattgtccgttcctcatatgctcctctttcatgcgcatgaaagtggcgtcattgtctgtctttgagtagctgtcacgtccatcaagtatttttccctatgattcatattttttgaattgttcaggccatgacttccttagacgtcttacctttgctttcattttcctgtcagcatcccccgttcagggtatcatctatctgcacgagtgccttttccactttcttcggggtgatatcctgatatgtgaccggagcggaatcacgcagttcctgtttggtgacggagccccagacgaacccgaactggatcattttggggaataaaatcgcctaaatatggaggcaaaagcagattatcgttggaggtgtaacttttaaacattatccttgggatatcttgacttgattccctaagatacgaaaaattagggacacgggcaagttctggctgagagaagttagggcttgtccgatttttttgcagacacaaaaaaggccatctcaaactcattttgagacagcctttttttctatctacccacaatcgccacctttatcaccccctccagcctattctcaaaaatacggtaggcttcatcaatttcctctaatgggaaacgatgtgtgataagtggtgtggtatctatctgtcccgccgctatcaggcgcagtatctcggcacaatcgcacccatccacaccaccggtcttgaagacaagattcttaccatacatctccggcaagggcaataactgaggctggtcataaagcgccacaatggtgacaatggcattgggacgggcacactcccatgccaagcggaaagtatcttccgtgccggcaacttcaagtacgacatctgccccaccatggtcgctatgcttcctcacaaagtctttgcagttttccggcccaatgaccagcacctccggataatgctcgcggacaaaacggattctttcggccgactgctcgcagacaataatgcgactgggcttcttcagcatggaacaaagcagggtacaaatacccgtcggcccggcaccgatgatgagtacagtgtcttcctcggttatttcggagatacgggcggcccaaaagccggtggccaacacatcgcctaccaagagcgcctgctcgtcacttaccgtatcgggaatacgattcagcccctggtcggcatagggcacacgtacatattccgcctggccgccatcgatacggcaccccaaagcccaaccgccattgggatcggtacagttgttcacatatccgcgacggcaaaagaaacatttaccacaaaaagtctccacattcacagtcacacggtcgccgggctttaccgactcaacgtcggcacccacctgctctacgatgcccaccatttcgtgtcctaccgtaattccgggtacagcacgcggtacgcttccatgctttatatgcaagtcactggtgcatatgctacccaatgtcacccgcacaatagcatcgcgtgcatcctccaatactggtatcggtttctcaagcaatccaaactttccgtgttcaatataagtatatgccaacataatatatgttttttgagttatcacttttaaacgcgaagttgccagaaagcaacggccgccgcagccgccacgttcagagaatcgacaccgtgcgccatggggatacgaaccacatagtcggctcccgcaatcgcttcgtgcgaaagaccatctccctcagtacccatcacaatagccaaccggggctcggtcttcaaaacgggattgtctatggaaatggaattgtccgtaagcgccatggccgccgtgcggaagcccaactcaccaagcgtatccaaaggaccgtccatccacgtccacggcacaagaaaaaccgttcccattgaaactcggaccgcacgacggttcagagggtcgcaggaattacgcgtcaacagcacggcatccatgccaagagctgctgccgaacggaagatggccccgatattggtggtatccaccaccccgtcaataaccacaatacgccgggctccccggcagatgtcctccatactcttcggaaccggacggcgcatggcacaaagaacaccacgtgtcaagacgtaaccggtcagctcggcaagcaattccctaccgcttgtgtagacgggtatatcgccacaacgttcaatgatttcagcagcatccccatagatgtgcttgtgctcacacaaaagggccaaaggctcgtagccggcatccagagccaccttgataaccttaggactctcagctataaacagccctttgtccggctcaaggcggttgcgcaactgggcttcggtaagggtactgaagatctccacaccgggatgagtcaaagatgatatttcgataataggcatcggatgatttattatttgacaattactatttacaattcatagcagaaagccctataacccctttattgtcttcatcagttgttctcccagtccgatggtatatccttgcgatacaaagaccacccgattgaaagtatcggctatgatgaatatcggcaggctctctttatgcttcaacttcatgctttctgcaatctgcgcagcgataccgtccgtatctataccataaataatggtagagggcaaatcggggaatgactcgcgggcgaacttgccggctttggcctcattagggaacagcaacaccatcttacgcccccacttctccaaatcagccttgaatgaagcgatatcgcgcaacgcatgattggttggctcttggttgacacccagaatgcctacgacaaagtaaccgcgcccacaagcctgcagcagactctgccgggctgcggagccggcgtccggcagcggagtgaagagagactccgaattaaagttcccgataacctgcacctcatcctcgctctcgcgcatcaccaattcaatttccgttgtcttctccggcagaatattgaaaaaggtggttttagaaagtaccgtaccgctggcaaggcgtgtacctgtcaccaaaacataacctccggcctccagagcagttccttccctcagcaggctattccaggtagtaccaccgcccatatccgtatcgccttcgtcataagaaagcaactgtaaactaccctgcggagtcagtttggaaagggtgaaatgagaatagtatttcgggttgtccaacgaacggataggcttataggaagccactaactttcccttcgaagcaattccttccgccataaagaccggctcttccggatgatggttcaagtccacatccgtcacaccatcatcccctatcaactgtactttgccggtcactccgttgatacgggcagggattgccatgctgcgtgccatggagacgaagaaaatgtcacggctatgggcatcagccacacgggccttccagaccccttctggagaaatgggagcccctcccagattacagtcattgtctacccggatattttgggccacccatgccaccagtttcatcggttctgccttgtatgcctcagcatcttcctttgagacggctttcttgaaaaagcctttatagggggtcagcatctcgttgcttacgcgtggattgcgcacatatctgcggaaatggtcggcattcttgcacatacgggattgcatgtggtccatcagaacttccagcgtaacgtcgcggaggtcttttgccgaaatccgttggagcaggtccagacctcctcttttggacttttcagagcgcaaccgtgccatgaagtcggcaatgacccggtggtttcctctggaagcgaccagtatccgtgaaacggcatcttcgtcgagcttgtactgccgggcaaaataacgtgctgtctcatccgtcatgaacatagacacataagcgttgcggatggaatcttcatgaaccatgcggcggtcgttcgccgcacgctgttcgggcgtaaccgtcggtaactccgcattttcgggtggcggcacaagttcaaaatctaccgcatggccgtcaccgacagtcttgtccatcttcactgtcagttcatggtccttgccgaaagacagtttggcataaccgaactttccgtctttggaggcccataccagcatgtcgcctttgccagccgtcaaggaagcttttccctcttcatcactctgtttccgggccacagtatagaactccgcataattatagagtttgaactccacacaggcatcagataccggattgccttgcccatccgttaccgtaacggtggacttggctgtcgctgcatagttaccgattacattgatttccgtataagtaggagtgacggacatcacttcctccgctccttcataacgtccgaagaccttggtatgcatcaacataccgcgactggccggagcattgaaccagccaaggttgagtaccggttccggttcgcaggctccaagaaaataccatttcccgtctgcccatgcttctacccacgcatgattgtcgtccgtatgcgcccaccggggggtgtagacctgacgggcaggaatgcccaccgaacgcaaggcggcaaccagcaaggtagattcctcaccacaacgcccgtatgccgtgcgtaccgttgccaaaggcgaactggtacgggcatcggagggagtatagatagccttctcgtggcaccagtggttcacctccagaatggcatcataaagggacagagacttgacacgattcttcagttcttcgtaaaacactacccgtgcactatccagatgctcattgttcacccgcaccggaagcacgaaatgacggaacacctcctcgggcaccgtttctccccaaggcatttcctcggccgccttccgagaggctcgcacattcatcagatgaaattcgccggggtagtcggttatgtctgccaaaggcatataggcatagagaaactccagtgcctcacgctcatacggcgtcaggtccgcatcgaaaatagcgaacaaatcaccctgcggtaacctttcctttttttgattgaagtcctgctccacacgttggcggtaagaagcgtctgtaatgaaagaacgtccgccacaagaggacagcagacataccactccaagaaatcccagaagtcgtgcaactcgtttcataatccttattattgaggttgagccacaaaaataaggattatatttcaatttttacttcagatgtatcaccaaagtcatgtctccggagaaaatgaagctacatttggcataggacggaggccccatcatgccttcggcatcattgctgaaaccaaacttctccgtagggatgccaaaagccccgctatccagcttcccgtttccattctcatcctggaaaagggaaatggcatacgtgcccgcaggaagtccctggcaagggatggagagcgacgtatcttttacatctatccggaaagcggtcaagggtttcttcatgaacgcctcttccgagttatagagggcgacgtagagatgtccctccaccttttcaatgtcacgcacttcaatggtcaggttctgagcaaaaagcatctgggcaacactttgtaacacaaacactaaaaaaataatcattgctttcatctttgttcttttttaaagagttatcattagaaattggatacatcgtaagcagccttcttccccaaagtgacgtacactcctacataaaagaaacggtcttgggaagccaggacagccttgttgtctactttgccaaactcattcttgcgaccgaggatattgctggcggaagcatggataatcaccttcttgctcgccagaaaggtcacccctaaatccaagctattataaggcttcacttcatcgttcatcaaccccggcagcaatggattatgatagggacgccccgtgctgaaacggttcgttaagctgatgatggagtgaagacggggcaaggaatatttcacaaccaatgccgcgttatgccgagtggcatactggggaatggtcagctcggaacaactctgatatttacgcttggaaatgttatacgtataggacaactggtattccagattctttatcgaaatccggtcgcggaagaacaagtctacacctctgctatatccgtatccaccggaagtcagaagtacactccccgttccagcatctgtttcttccagaaccaagcggctatagtctttataataaagttctgccttatagaaacgtccttcataaccgtattgcatccccagattatattgcatgcacacctcggacatcaacttccggttacgtaccaaccagtcattttcgggcaattgcgtgtagcggcccactatgccagagagcatcatatcccccaaatagtaatttaccgccagacgcggagaaaaattcatcttccggttcagagaagtatactccgtacggaaagacaattctgccttcaagcgctccagcggatagtaagcagccgaaaagaaacctgcactgatagtgggggacatttggttggcatcgtctatgtcggagtatagataacaattccgatagttacggatataactctccacccccatatccaggtggaatactgacgagaagcgcctagacatcttagtcttcaaatgcaactcccactggcgttccagccaattatctcccgaaacagcagcagcgttgacctcccgattataataggaataagcagcccctgcaaaccagtcccatccacctgccgcacgatagcgaaaggtagcattgacgtagatgttgtcttcggccagagcgaacaatctgcgttcatccccctcataggcagaaaagtctgtccggtcatattgcgcatagatcttaaaaaccgtcgcatcgccgggggtatgacggaactgggtggcaccggaaaacatccggtagggccgctcaaattctgtccgtccggaataaaccttgtcatataagctcagattctggtaattcagatcgacggacaaggagccacggtccaaagtcttggtaccgcccccgcccacaccgactacggaagcattcacgcccaccttatccactttactataatccttggtttctaagggcagaacagccgaaagagcctctccgtactcctgcgaagccccgccggaagcaaaattcaccccactgaacatgaaggtggaataacgactacgcgaaggggtatttattccattggaggtatagggattcaacacatgcatcccatcaatgaaggtctgtgtctcatagctgctcccaccacgtaccagtaattcgccggtctccccctgcacctgcgtaccgggcaaggtctgcaatgccttgtacaaatcaccgtttgcaccgcccaccgtgactagttccaccggatgcatatcgctccacctgctattggcggcaggagtctttttccctcttaccaccacttcgtccagacctatactatcgatattgaatgtcagacgcacggtatccgtcaccgacttctgcgctacggaagcttgtacaaagagaagtccgcccgtcattaaaaagattattttccacttcatatcttcatgttcgttatgttttcctgccacaaacataaaggaaggacacggacaaaaaaaatatccgggacagacgacccggatatgtgacgaacaaccaacgacttgtgacgaatggcgtatctctgtgacgaatagctaccgctttatcttgttttctatcagtgctttcacctccttggcataggcacgtgaaacaggaatctcctctccatctccctccagcctcaaccggtatccttgagagtttccgtccactttcaccaccttgcgggcattcaccagaaaggctctatgacaccggataatgaaggggcaggcagcaaccgcctcctctgcctgcttcatcgtggcacgcaacatcttccgggtactctctcccttcagtcgataatccaccttcacataatttccttcagcctccgcataaagaaaatctacggccttcacttccagcatatctttggtgccaccggaaaacaccaacacttcctccggagaaaactccttactttccgccccaacctcttgagatgccctctttgaaaggtggcaatttatctccatggcttcttgcagattacgggtcagttgcaaattgcgattccacagcaagaaaaacacgactggaaaaggtgccagtaccattacccaagacaaagccagaaaaaacaaccgcttgtccagccacatacccatcaaccatgaatgatagacccaaattcccaccgctatcagtaacagcatcagcaacacgtccaacacgtgtttacccaacgtccagttctgctctttataataggtgggaaacaatgccggaagcaggtaagtgaagatgctcgaagcacccgccgctataagtgccgaaccggcaaccacccaaaatacaccttcctttatccgggaaataccgaaaggttggagtatatatagtatcagaaatataatgaccgaaggtatcaccaccgctttccaacgttgataaaacatgggataggggctccgccaaagttctgtcagtttattcataagtattacctctcttctttacatggtagtacatgcaaagatatgtaatatatttgttatatacggattgcaaaatacagtatttctagagaaaatgaagaaagaaacataagtttttatgttatagaacatatttatcgcaaacatttcgtatctttgcagcgttataagataaaagaaaagatataaaacccgctttccgaaacgcggagagcacaaaaagatgagaattatgaaaaagaatgcaaatgaaatttttatgttacagtaccaaatcaaacgctatcaagcaatgggtaatggaacaatgtgccaaacactgaacggtaaactacaaaaactgcttgcaaagcagccccttgtaaccatgtaaaaaaacacctttaaatacaatgaatgaagggcggagaactgaaaaattccccgcccttcttcttctctggcatattccaaaccaacagaaaataactcaagccgcaacaatatccttcccgaaaggagtcaatgccagccctgccaacttaaaatgttgaataccgaaaggaatgcctataatagtgatgcacagcaacaacccgaatcccaagtgcgaaaggcaaatccaaatgccgcccaagaatatccaaagaatattcatcagcacatagaggcaaccgttggaacgttccccgctacgaacctctttgccgaaaggccacaaggcaaggcttgccattttcaaggtctgcatgccgaaagggatgccaataatggtgaacatcatcaataaacttgcaataagatactccacagcagtgatgatacctccaaacatcaaccacaaaatattcataaaacagcccatagctttcctttttttaatactgaacacaaatatagcattatttatttgaatggtccgtctcccagtcactaaattcaaaactcagctgctcccagactcctttctcctccccctcttcacgggggttggaaacggaaagcccaatcaaacggataggatgatgttcataatccacttcctgcagcaattgctttgccaaaggcagaatcacgtcaagggcaaccagctcctttgtttgggtcatactgcgggtaatctggctaaaatcatgaaacttgattttcagcgtcagcgtattcccgcggaaattggcgtgctccagtcgccccaccagctccactgccgcatggtacaactctataatgacggatgaacgcttgctgatgtccttctccaacgtatgttcacagcccacagacttgcggatacggacagcctctaccggacgggtatcgatgccacgggcaaaatcataatagactgtccccactttgccaaactcgcgggtcagcatttccaaagactgcatgcgcagctgttccccgttgtgaatccccaaggtgtacatcttcttcgccgttaccggtcccactccccaaaaactttcaatgggcagccgggcaacaaagtccagtgcctgggcaggatgtatggtgcaaagcccgtccggcttgcggtagtccgaggctatcttggcaagaaacttattataggatatgccggcggaagccaccagattcaacctctcccgcaccttccgctttatctccttcgcgatgtccacagccaacggaatgcccggtttattctccgtcacatccaaaaaagcctcgtccagcgaaatgggctcgatgacatccgtatattcatgaaagatttcgtgtatctggcgggaaacggatttgtagacttccatccgtcccgggataaagataagttgggggcacagccgctttgccttcagtgacgacatggcagaacgcaccccgaaacgccgtgcctcgtaactggctgccgccaccactccccgctcctccgcatggcccacggcaatgggcttgccccgcaatgcaggattatcacgctgttctacggaggcgtagaatgcgtccatatcgatgtgtataatttttcgtccggtcattcttctttcaactccccgatacaaagatacactaatttttcttcatccgaagtatccgccgatagacataaatgaaggctggtattaaaaaggcatctgcaaaaatccatgcagtagggtcaccaaaacaaacggccagatagccgaaagccggaacagccagcaggctgaccagtatccgggcaatcatttccgagacaccggaaagcatggcaagattggtatatcccaccccctggatagtgtatcgcaggatgcagagcagtcccagaaccgggaaaaaggaaacggaaatgtgcaggaacaactccgtattctttaaaatctccaactcagaggcatctacaaagagcagggcaaaagtcctggcaccgaacatcagtacacagaaagtgaacgcccaataaacaatcatcatcagggtgcttgccttgactcccatccagatacgttccggcttgcccgcaccgtagttttgcccgctataggtggccattgccatgcccagactctcgaaaggacacatgaaaaacatcttgatacgcatggctgccgtgaatgcagccacacaagccgtacccaaagcattattggcgctttgcagcataatgctgccaatggcagtaatggaaaattgcagtcccatgggtacgccgatgtacatcagtgtgcgtgccaaagcaccgtcgaatttccgctcggcaggcgttgtcttcagaatgtcgaaacgacgcatcatatagatgtagcacaatatggccgagacgccttgtgaaaatacggtagcgatggcagctcctgccactccccaacccagtaccagaatgcagaacaaatcgagcaggatattcagtaccgtagagagaagtagaaaccaaaacggcgtcttgctgtcacccaatgcacggataatactggacagcagattatagaagaaagtaaagggaaccccgataaacgtgacaagcaggtaataataggctcccgtgaatatgttctccggcgtactcatcatgtgcagaatatctgcacagtaaatgctggtaaccacggcaatgacaacagacatcaccgcagccagctgcaggctgacagccacataacggcgcatcgtgacataatcccgcgcaccgaacttttgcgccacgggaatgccgaaacctccgcaacagccattgcagaatcccagaataagaaaaacgaccgaagtgcttgccccgactgaagccaaggcgttgatacccagaaagcgccccacgatggctgcatccaccaatgaataggtctgttgcagcagattgccgagcagtaaaggcaaagtaaagttgaaaatcaacggaagagcccgtccttccgtcatttctctggatgttgccataaatctgatacctccgaaattgggtgcaaaaatacgaaaagatagcgtttacagacttgacgaaagtcaaatttaatagggaagcttaaggagaaggaaggcgaaggataaatcgttccatcgtgggggaaatattattccaccactaggaaaaaatcgttccaccatggtggaacgatttttcctccacgatggaacgattaaatctatgcagattcggagcttagtatttacactcgcgaattatctctatcagctgccagaaatcttcgggatgaacatctccgatattgccgatacggaaagtgtcggcttgcgaaatctttcccggatagatgacaaatccacgctctttcagttgtgtgtagaaagctttgaaattgaaatcggcatgaggatagaggaaagaagtaataacgggcgattgaatctcgtccggcagcaacgtttggaaaccgagggaacgcatgccgtccaccagcacgcggtggttctcgcaatacctgttgtgacgggcctccacaccgccctcctctgccagttcgtccatggcttgcttgaaggcgcggaccacgtgtgtgggagaagtaaaacgccatttgccatgtcctttctccatggcttcccattggtcgtaaatgtcgagagagagtgacttggagacgcccttgcagtgcaacagctcggaacggcgagcgatgatgaagccaaatcccggaacgccctggatgcacttgttggcactgctgatgaggaagtctatgcccagttcgtgtacatcgaggggaacaccgccgaagctgctcatggcgtctacaatcagtttcttgccgtgcatcttgacgaggtgggctatctccttgaggggattgagcacgccggtagtggtttcgcaatgcaccacggcaacgtgagtgatttcggcattgtgcgaaagatagtcgtcaacgtagctgacggagacttgctccgtttcgtcaaaagcaagcatgtcgtacgagatgccgtgatactcggcgatgttgcccatgcggtcgccataggcgccgttgctcagtatgagaagtttgtcgccaggcttgatgacgctaccgatgacggcttccacacagtacgtgccgctgccttgcaggaggatggaagtatagtcgccggtatgctgggtggcgagggagacgagggacttacggatttcttccacaatgtggaggttgtagtcttcgtcccaggtacaccagtcggtcagcatggcttccttgacagtttgtgaggtagtaagggggccgggggtaaggagaatgtagggtttcatatgcattgagtttttaagtttatacgtttataagggttacaaaatctcaagtttacggtttatctcggcgatgactgcgggaagctcggcaatggtatcgaccacatagtgggcaccggcggcaagcatgcggcggcggacatcggccttacgggcttcgagctcatcggcaggcaaggaggagacttcctcttgtgtcagtcccagttcgttactgccgaggactacaccgacggtccatgctttggcattgataccctccttgatgtcggcgatggtatcgccatacttcaacacacaatctacggaggggatggcgaggtctgccatattcttatatatcatgtagggagcaggacggcctgcaggcaacccgtcgggagtgacacaattatctaccgcatagcctttggcagtggcggcaggcagcacaacatccatcatagagcgggtatagccggtggtggagccaatgcggacgccttgcgcacgcagtgcggaaatcgtttccaccacaccgggaatagggtcggtataatcttcgagcgaggcaaacaacacccgttggaattcggcataacgtgcctgcacgtcttcctcaccggcgggacggccgaatttccgttcaaattccgcacggacacgctctatattgaacagcgcacggatttcttctactttggtcagccccatgtgcgcacgtgtttcggcagcagtgacgggaacgccgatggcccgaaagctctcgacaaaggcggcgacgggagcaaagcaaccgtaatcgacggcagttcctgcccagtccataatgatacattcaattcttttcatacgatatattattattattcagtctcaagaagcaaggaattgcccggccgggaccaacggcgcaaacggaaaagggaagagcccaacggtcccgaagcattctccttgcgatagcgctgcaccaggtagacagccgagcataggaaagccacgctgcacacaatgcctacatagcccgacatcaggttatagaaatccagccagttgatgtccggattgaaaaattccttgaataccaataccaccaccgtaccggtatacccgataaaatcgagtgtgacgataaagaaccccacattccccttgatgcggaagcaggcgatgaaacgctcgaagaacaacgtctgaaagctgaggtaaacagtatagagcgacaaactctggaggaacagccacgtcatgggtggcagttgcaacccatcgtaattgaaggccacgaatcccaaggtcgctgtgccgcacgtcacaagcaccagcagcaggcacagcacctttatattactcctcaccgcggacatcagcccgaaaagcaacaagataatcagtgtcaccaccgcatctaccttggcaaatgcccacgacgacagccccaccgcctccacatccagaatcttcaccaggaagtcctccttgatgtcctgcaagacggtgatgaacaagtttgccgcaaacagcatcagcaataccggcatgaagctcttgaagaggtccgcacgcgccctgccgtccagcgtcacccgttccgagcgcagtgcccggtctgccgcggtaggttgcggcattctcgtcatcagccagcccagcaacgacagcagcgggaaggcaaaggcaccgataaaggcaggcatccagaactcactgatgtggagatgctccatcacaaacagcccgacagactttgccgtgcccgaactgatggcaatgctcagccccatcaggctcgccagcagatccgtcacccgccgcccctcgaggaaactgaaaatcactccccacatgcatcccaacgaaagcccgttgaagaacagcgcaaagacattcagcggccggggcaacgctccgaacagcaccagcgaaagctcggccaccgccaccgagaggatgatgaacttcagacggttctccttcttcagttccgaaattaccttgatgccaatcagcttggaaataaaatagccggaaatctgcacgatgctggttgccgtcttgtaatccatcccgaagaagtcgagcccgtcgaagcccgcagccgtaaacggcttgcgcagcgcatagaccagtgaataggaaagcaaagccgctccacccgcccaaaggatgaataaggcatcagccagtctcttgctctgtattatctgttttttctcaccgttgaacatagtgtgttgtttaaattcgttcttgatttcggtggcaaagatagaggcgggcgctgacagcaaaaatgaatttccattattaataaacttcatgaaaacagccctttattatgtaacattaatgaaatatttatgtaacgccagcataacatccgcaccttttctttgcacccatttaagtaatgtatcatagaagcacacccttatgaacgaccttttagacatatacaaacgcatcgaatacctccgcaacaaaggagtgaaaatgaaagaaatggcagaccacaccaacatggcggcgagcgtcctctcctccctctactccagcgtcctccccacctacatcagcaccctgcggaaaggcagtacggaggaagaatccctggactacgccctctcccaagtgaacaacgtatcgaagaagcgcctcctcggctccctcaaagaactgaaggaacaactttttgagctggagcctgctccagccacggggcaaaaagccaaccctttcctcgacatgctgaccgaagagatactccactcggcgcaggaagtatacaattacagcggcatctacatcagttacagcctctcttcctcctccaatgccttaaaggtggagccttacctgataacccctgccgacagcaacgaccacgtcaaagtggtgcacatgagcgcctacaacaccacccacttcggcactgctatcttcaacaaccaccagaatgcctatatcttcttcaacgaacgcgaggcgccccaactggccttgttcaccatctacctgcaactgcccatgtacgactttccccacctgctcaaagggctctacctctgtctggactacaaccgcaaccccatagcccgccgcatcctcttcatcaaacactcggacagcacctccatggacgacttcctggaactgaaaggccaactcatcccccaagaccagctgaccgacgagcaacgcccctactacaactacacctgccagccgggcgacttcatcaaaacctgttccgtcccctctcccctgctgaacgagaaagacctggaacgggagaaacggatgctggaaatctaagacagcccggacagtccgggaattttcactttgcaaccaagttgcatctcctttccgctacctttgctgcagaaaatagaaaataggaggaaacaatatgagttgcaaatgctgctgcacacacggacatacagcgatacaagaaaaaagaaacagtctgctgaaagattattggagaatcatcctctctgccctattgctcttcggagggctcatcctgaatgctactgacgccaccttcttcaagggagagtatgtaccttttatatggtacttgcttgcctatctccccgtaggcctcccggtgatgagggaagcctgggaaagcatcctgcaaaaggacgtgttcagcgaattcacccttatgtccatcgccaccctcggcgccttctatataggcgaatatcccgaaggcgttgccgtcatgctcttctactccttgggagagctctttcaggacaaagccgtagacaaagccaagcgtaacatcagcgccctgctcgacgtacgtcccgaaacggcaacggtcatcagaaacggcagtacgcttgtcgaagctccccaacgtgtgcaggtaggcgaaaccatcgaagtaaaagccggagagcgcgtccccctggacggaacgatgctggacgaagttgccgccttcaacacctccgcactgacgggagaaagtgttccccgcaacatccgccaaggcggggaagtgcttgccggaatgattgcgaccgacaaagtcgtacgcatccaagtcaccaaacccttcgagaaaagtgctctttcccgtatattggaactggtgcagaatgcctccgagcgcaaagcgccggcagaacttttcatccgtaagtttgcccgtatctatacgcccaccgtcaccggactggcggcattgattgtactgctccccttcctctattcgctggcagatgcacaattctcgttcatcttcaatgactggctatacagagcattggtctttctggttatctcctgcccgtgcgccctcgtcgtaagcattccgttaggctacttcggaggaatcggtgccgcctcccgcctgggtgtcctcttcaaagggggcaactacctcaatgccatcacccaagtcgacacggtggtattcgacaagacgggtacgctgaccaaaggcaccttcgatgtacaatcctgccaggcacaaccgggagttacggaagagaagttgatacagcttgccgcctcggcagagcgaaacagtacgcaccccatagccaaagccatcgtaagctatgccaaacaaagggatatagagctgattgccacaacggacgttacggagattgccggccacggactgcaagccactatggatggaacgcgtgtcctggtgggcaacacccgcctgctgactaagttcgggatagaatatcccgatgaactgtcatcaattgtcgatacgattgtggtctgcgccatcggaaccaaatatgccggctatctgttattatcagacacattgaaggaagacgccgtcaacgccgtcaaagaattaaaagctttaaatatcaataatattcagatattatcgggagacaaacaagccattgttactaactttgcagaaaagctaggcatcacccaggcatacggagacctgctgccggacggaaaggtgaagcacatcgaggcactccgcagcaaccctgccaaccggatagcctttgtgggcgacggcatcaatgatgccccggttcttgcccttagtcatgtgggcatcgccatgggcggacttggcagcgatgccgccatcgaaaccgccgatgtagtgatacagacagaccagccttcgagagtggccaccgccattcatgcgggcaggcaaacccgccggattgtctggcagaacatctcgctggctttcggagtgaagctgcttgtcctcatcctcggtgccggtggaatcgccacactttgggaagctgtctttgccgacgtaggcgtcgccctcattgcgatagtgaacgccatacgcatacagaaacttattaaatagaaaaaatggaacaaaagaaatatttggacctattggccaaaagagacatacagcccactgccattcgcatcctggtattgtgcaccatgatgcaggcaggccgttccgtctcattgctcgaccttgaaaccatgctggatacggtggacaaatccaccatcttccgtacccttaccctattcctctcccatcatctgatacacagtatagatgacgggacgggttccttcaagtatgccgtgtgcagtgacagttgctcttgcgacgtaagcgacctgcacacccatttccattgcgagaaatgcaacaagaccttctgcttcaccaacattcccactccggtggtgaagctgcctcaaggatttacactgaacagcatcaactatgtactgaaaggcatttgtccggactgtgcagcagaagccaaccgggaggcttagttaaaaaataaaaatccatgcagtcattcatgttcttctctatctttaagaaataacattgagacaaacacatggatacaaaagctcttgtcactttatgccagaagggaaacgggcaggccttgagcctgctctacgaaaactattcagagaaaatgctgaaagtatgcctacgctatattcccgacccaacgatagcccaagatcttcttcacgacggttttgtcatcatattcacttccattcattcgctgcgcaacccggagaaactggaatactggatgaaaaagattatgagaaacctggcactgcaatacctcaaccatgccaatgccaaccccaccatcccattgacagatattccggaagaggaagagcctgctgaaaatcctttttgtccggatttcatttcgtacgataagatgctggatatagtggagagccttccggagggctactgcaaggtatttaaactggcagtactggaaggattgtcccacaaagaaatcggagatttactgggtatagcgccacactcctcttcctcccaattgttccgggcgaaaattttacttaaaaagatgctggcaggataccgtgtattcattgttttgacagtattgcttctctttccaacgctgtatgactatctgtacagagagaaaaagagtatcagggaaaaccgtttgtccaaagtttcttccaggcaagccgggagtacgcaactaacaaagaaaaccgatactccccgaaacgacgaacaatgctataccaaagaaaatctgaacaaaagggaacgaatcatccctcccgttcctgtttccacagaatggccccttaccatacccaaaatgaaagatagcatccacaaatatcccataccctctccattcaccggacagaccatcaccaaccggcagatggctttcgcctcctccccttccccgatgctgccaacccgcaagaagaaatccgggaaatggaagttgatgctggcaggttcactcggaccgcaactggcacagaacttatataagctgattgccactccacataccgacggcatttcaagtgacttccctcaacaagtcagtacgtgggaagagtattattcttatctgcacacccgctatcagcagggtactctgggaaaagattccatcggactcatgcagattgcccagaataacagcggcaggattgttgagaaccagcagcatcatgcccccatcgtcgtgggactctctctcagcaagaaattgaatgagcgttggagtctggaaaccggattgcaatatacgcttctcaggtcggagttcactaccggcgaagcattccgcattcaagacaaccagaagctacattatatcggcatccctctccggctttcctaccgtttctggcattacaaacgtttctccggttatgccacggcaggcatgcaggtggatatccccataaaagggacactccaaagcttccatgtcacggacagtattccacacaagctcggcagtcatccggtaagtgctccctggcagtggtcggtcaacacaagtataggcatacaatatcacctcacaccccaggcaggcatctatctggagccgactgtaaactattacatccccgacggcagccaactgcgcaccatccgaaaggaacatccgttcacattcaccctcccggtaggcctccgcatttcctggtaaaaaaacgatgtgccacgcagtcttttacccgactgattatctatttatatggataatcaaactcaagaaggaacaaagaacatgcagaaacgacataccgaccgggaaagctactttggtgaacagtcacagaccagcaagaactattatatcccctacataaaggaagtcatcggacacatccccgataaagtgctggaagtgggctgtggagagggaggcaatctgctcccctttgccgaagccggttgccgggtgatgggcgtagacattgatgccacgcgaatagaacaagccagaaccttcttcgcccaaaggcatcagcagggacagttcattgccaccgacattttccagcttaaggacaaggctacgaattttcccctaattcttctacacgatgtgatagagcatatcagagacaaagaacggttcctctccggcctacaaaaacatttgtctgccgatggagctatatttgtagggtttcccgcctggcaaatgccattcggaggccaccagcagatagcacacagccgcattgtttcacacttcccttttctccacctccttccccgcactttatacaaatggatattaagactatgcggcgagcaggaacacgcaattacggagctactggatataaagagcaccggatgcaccatagaactgttcaatcgtatcgcccggcaagccaactatcaaatcattgaccggagactgtaccttataaacccacattataaaatcaaattcggcttgtccccacgaaggctcaacggagttattgctgctatcccgtatataagaaacttctcttgtacaagttgcttttacatattaaagaaagggactaaaactgttaatcactactgatttcccagctttagaattgattccgaaccatcaatttaagattatatattcagaagaaaccattaattttttgaatagctctgatgaaagagtgggtgtagaaaccctcataaactaaaaaatccccctcgctgcagatggttgtagcgagggggatttcaataaaagaggaacttgcacttcttcccttttaatgtttttacatcgttacttggttcattacagcctcgtcaggtgtcgttcctatttcatcggcaaataatatgtgggtgatagaccctctcggggtcggagtttcgattttaattctttgaccttggtacatctccggaatatcaaccagcttacatctatgggcttcgttattgccaaaactgacataatagtcttcccctattaccagctttacaggtttacgttgagagaaatgaatcggacaaacagagctatccacttttatatctatcacaaaaccaagagcggatgttaccttagatagtatatcaatgctcacattataagcccctttctctatcttggctatattaacacgattaacaccacaaagattagccaattcctcttgggtcatatttctcttcttgcgaagaatggctaaccggttaccaatccgttcacgttctttcaaaatcttctctgtacattttccttcgtgaattttcataaatctgttgcagaatttaaagtgttgcccccacttctaatagttattgatttttgaacagacaaaagtagatattaattttgaattgtagcacatttactacaattatttttaaatgaatataaaagatagaggaagtagtagaaaaagaaattccctgaatcattgaaattcaaggaattaaaaacttattttcccatttttcgtggagctggagggtgtctctcgaacctttttataaaatttcacaggatatcaaatatcatgtaatcagttatttatctctttctttcattaatctaaatatctcttaatatcattgtatatctcatttttcgggtgtatttttgggtgtcattttcaaacacacccaattatgaatattaaaagaaatatcattttcgcaccggaaagccgcaaaaaagacggtattccagtcacaaagaatgtgccaatccgtatgcgtgttatctttgccagtcagcgtatcgaatttactacgggatatagaatcgatgtagaaaaatgggacacagacaagcaacgggttagaaacggttgtaccaacaagctaaagcaaagtgcatccgaaatcaacgccgaactattacggcaatacaccgaaatacagaatgtgttcaaagaattcgaggtgcaagatgtaatacccacccctgcacaaattaaggaagcgttcaacctaaagacaaaaggggaaaagaaagaaaaccatgaggaaaagcaaaaggttgaattagacttcatgaaagttttcaatgaatttgtagcagaatgtagcaaacaaaatgactggtcttcctcaaccctcaaaaagtttgcaacagtcaaaaaacacatttatacatttgaccctaatactacgtttgacagttggacggaaaaacatttcaatgactatatagaattcttgcgtacagaaaaaaacatgcgcaacacttccattgccaaacaaatcaaattcgtaaaatggttcttacgttggagtaatcgaaaagggtatcaccaaaacatggcttatgataaattcacgcctaaaatgaagagtgcacccaaaaaagtgatatttctcacccaaaatgaaataaataaactaagaacctgcccaataccaccaacaaagaaataccttgaaagagtaagggatgtattgctattttgctgtttcaccggattacgtcactccgatgtgtataatttgaaacgtagtgatgttaaaaacggtcatatcgaagttattaccataaagacggcagacagtcttattattgaattaaatgaccacagcaaggcaatactcgaaaagtacaaaggtgtgccgttccctaatgacagggcattgccagttgtaagcaatcaaaggatgaacgaatttttaaaagaactgggacaactggcagaaatagatgaaccaatacgagaaacatattatagaggaaatgaacgaatagacgaagttacacctaaatacgcattattaagtactcacaccggaagacgaacatttatctgtaatgctttggcacttggcattccagtacaagtagtaatgaaatggacgggacacagcgattacaaagcgatgaagccctatattgatatagcggatgaaatcaaaatcaacgctatgactaaatttaatctgatataactatggacgaaagaataacatcaatgataccccactacgggaaactcaacaagatatataccgaaataatgtccggcggcagtttctcttttgagaagcagcaattcatttccggcttttacggagagtacggggacacgcagacatttgaaaccgcactcatcagcctcatgcttgaaatggacgccgcacacttctccatattgctgaacagcctgaaacgtgagattgaaagcaacatctcgacttacaacgcctgcagggagtttttcgaccgtctcgataccgaatacgtctgccgacggcatgaaagccgttttgactgggacatcgacagacagatgaaagtcacaaacggatattaccgggaactcatggaagccaacggctctttggaagcggtaggcttcagggagcatgaccgtcaggaagaggaactgctggaaagaaggtacgaacggtgcaagcgggaatacgacaaggaaaaagccaaactggatgaactgtacaaacagaaggagcaggcaaggcgggaagccctgcaatgcctgaaaaaccgttgcggggacatttgcagactgggcggctcactattggcaatccttgaaaaatacctgaccgaccaaaagaaaaaggagggagaggaaaaggaagccgccaccacaccgacaagccaacccgcctacttccccatgaaacttttgtcagccgtttacgaaagatgcaacggtgagcagttcgaagccgtttcagaactggacttctacgccagcatgaacctgcaaccatgcgaaggcagactgaaaataagaccgagggagaaagcccgtgtatgctatctcattttccttatgggtgaaacgctgcccaagccggacagagaaaaatggaaaggggacatcatgaacctgctgggaatagacgatgcatactacaagtcaaaatacaaagagcccgtttccgatttccccagtgacagcaatcaggtatttgcaaaggaaatgcggtcaatattccgatagtcggtgatatgtcccgacactccacgacacgaccacttttaccactcaaaataatttccgccaccctttattatcttctgatatttagtgagatagcgtgaaaccacaatcacgctatccacatccttaccacccgtacccggaactaactttgcactgttcgaacgaggtaaaaagcccatgcgcagggcttgcagtacaaacgttaattcattctgatatggaaattagagaccttttatcaaagcccgtatggcagatgacgggcgaagagttcatattcctgaaccgccatgccttgcaaggaagcgaaacgaagccagcccagccagcagccgacaaggacaagaaatacgtgtacgggataggcggcatagcccggctgttcgggtgcagcatacccacagcaaaccgcatcaagaaaagcgggaggatagacagagccattacgcagataggacgaaaaatcatcgtcgatgcggacatggcgcttgaactggcaggacacaaaagcgggggacgcagatagggaggtgcgatatggacaacaaggaaagaaacatcacgcccgaagaggcggtaatcctatggcaagcctcacggctcgacctttcggaagactacgagaaggcacccgaaattctgaaagtgcgaggctccgtcatcggtacgctggggaatttcagcgcgtcaatcggaaaagccaagagcaagaagacgttcaacgtctccgcaatcgtggcggctgcgctgaaaaacgggacggtactaagctacacggctgaactgcccgaaaacaagcggaaaatactctatgtggacaccgagcaaagcacctaccactgcgcaaaggtggcaaaacggatattgcgcatggcgggactgcccgcagacagaaaccatgaagaccttgaattcctcgtcctaaggaagtacacgcccgaagagcgcatagcaatcgtgagggaggcaatctaccgcaccgagaatatcgggctggtagtcattgacggaatacgggacatggtgcatgacatcaacaaccccggtgagtccacaacggtaatctcctatctgatgacatggacgggggaaagggacatccacatccatactgtcctgcaccagaacaagggggacgagaatgcaaggggtcacataggaaccgagctaagcaacaaggcggaaacggtgctgcaagtggagaaggacgagaataaccccgacataagcaaggtcaaagccgcacacatcagggcggtggacttcgagccgttcgcattccgtatcaatggggaggcactgcccgaactactggacggctaccggttcaaggagaaggagccgggcaaagggaggaggggaaaattcgaccccaacaaggacatcagcgagcagcagcaccgcatcgcactggaagccgcattcaccctgaaagacgaatacggctacaaggaacttgcgggagtattgagggatgcctacgcctctgtgggcgtcatacttggcggaaacagggtgacagacctcattaccctattgaagaacaaacggatgatagtgcaggagaacggcaggaaatacaccttcaagcccgatttccactattagcggtatggcatgggaaccactttactttagtcacgtaccatatatatacggaaataaagtaaagtggatatagcccgtaacatatagagaggtacgggcgaaaacaaaaaaagatgttcacaccgcctgacaagaaaaacagcacgggcatgacagcccggaaccgctttactttagtcagggtgcatatatatagcgaaataaagtaaagcggatgcagcccgcagcatgcagaaggtacgggcgaaaacaaaaaacaatatccacttaaacagaaacccacatgaatacgaatgaagcgaagcggatacgcatagaggaatatctgcacagtcttggctacagcccggtaagacggcagggcaatagcctatggtacaagtcacctttcagggacgagtgcgaaccgtccttcaaggtgaacaccgagcgcaacctatggtacgattttggcgcgagcaagggcggcaacatcatcgcactggcgcaggagctctacgcatccgacagcctgccctacctcttggaaaagatagcggagcaggcaccaaacgtgcgcccggtctccttctcttttggcgggcaacctttctccaaaccgagcttccgacagttggaggcggtgccgctttcttcccccgccctattctcctatctgcggcagagggggataaatacggaactggcaaaaagagaatgttgcgaggtgcgctatcaaactgacggcaagccttactttgccgtcggttttcccaaccgttcgggaggctacgagatacgcaacaagttcttcaagggctgcatagcaccgaaggacatcacccacatacggcaggaacagacgaaggagacctgctacctcttcgagggcttcatggactacctctccttcctcaccctgcggctggaaaggtgtcccggacgccccgaacttgacgggcaggactacattgtgctgaactcgactgccagcctctccaaagcaatccacccactgggcgattacgaacacatccattgtttccttgacaacgacaaggcgggaatggaagccgttcaggaactgcgggaggaatacgggatgcgcatacgggacgcatcgcacatatacggaggctacaacgacctgaacgacttcctttgtggtaaacggtcaggacaagcggaacggtggcaggagaagccggaaccggagaaaaggcaacggcaggcaaggcaaccggagaggaaaggcaaaggcatcgggatgtaaccgcacatgccaacggaaggctttaaaaaagccatagctcattagggctttttcttcacgcaatgcacgcatcgctaaaaaagccccaatgagcaaaagggacgccgccccttttgaaaccccgtgagccatgcggcatggaagcaaggcaggggaagtattaaccgaaaaatgtattacagttatgggatatgcagttttgcatttggaaaaggcaaaaggtgcggacggcgcaatgtccacgcacatagagcgcaccgtacacccgaagaatgcggacagaacgcgaacgcacctgaaccgggaactggtacagttccccgaaggggtaaggaaccgtacgcaggcgatagcgcaccggatagagacggcaggcatcaaacgcaagataggtaccaaccaggtaagggcaatccgggtgctgctcaccggaagcaacgaggacatgaagcgtatggaagaggacgggaggcttgacggctggtgcagcgacaacctgaaatggctccgggaaacatacggcgagcggaacctcgtgtcggcagtcctgcacatggacgagaagacgccgcacatacacgccaccattgtaccgatagtgaccggggagcgcaggaaagccagacaagacgaacagaacgggaagaagaagtacagaaagaagaacacgcaggatgtgcggctgtgcgccgatgacgtcatggcaaggcacaagctgaaacactatcaggacacctacgcacaagccatgagcaagtacggcttgcagagaggcgtggacggttcgctggcaaagcacataccgacctcgcaatattacaaggaactggtggaacggcaggacagcctgcaggagaacatcgaaaacctgctggggctggaagaggaagcgcagaagaagctgaaaaaggtcaagggggaaatcaacgtgcagaagatgaagggtgcggcggtgaacgcaaccacagccatagcggacggggtgagttctcttttgggcggcagcaaggtcaagaggctggaagcggagaacgaaaatttgaggcaggacattgtggctctgcaaaagcaggtacaagccgaacagagggagcagacaaaaatggagaaccgccacaacagcgagataaacaagatagaccggagctaccagcaaaaaatcagggaatacgacaacagactggaacagatagacacctatttccctatcgtgaaggaactgttgcccataaccgaacaatgccgggaagtggggtttaccgaggaactgacaaggcgggttgtcagcctgcaacccgtggagttcaagggaaggctctattcgaaggaacacaaggagaagttcagaacggagcactcgacggcaaccgtggagaggaacccgcaggagaaagggaaattccggctgtgcattgacggcatgcccatactcgaatggttcaaaatgaagtttcaggaactcaaagaaaagctgggtgtaagccacaccccaaaagaagagaacaaaccgaaaagagggttgagattgtaaaacgtaataaaaaataggggctttggtttcatttatttagctgttttttgtatttttgtattggattgagtatgctctttccaagacatattagaatttttagaagcgttatgcttatcttgtagatgaaaacgtaggaaattttcaaagagtacaaggatagcatagtggttctcacgctatagcgtgggctgctatatccatatctgtactcaaggtattttcctacgaccttcatctaagacgtggcatgcagacccacgcttctttttgtataactctgcttagtggggtctcaggcggctatatatgaaaccaacaacatgatttcacaagatgaattttctttatttgaccctcaaaaaatgagagcttcagtcttacctgacaagcccggtaactatatcatagtattacgtagtacgtcctcattgcccataaaagtacaaatttccaccactcctatactaacctcttttgattacaaaaaagagaaatacaatgtcgtgtatgtaggcaaaagcagtaaaagtctgcgtattcgtgactacaaacaacatttcactggcactgccggaaattccacaattcgcaaatcattaggatgtttattgggattcaaactgattccaagagacataaactctccccaaaacggaaaaactacatttggtgaatttgacgagcgtacactgaccgaatggatgaaagacaacctgctacttttttattatgcaaataatgattatgcaaatgttgaaaaagaattgattcgcatatataatcccccgcttaacttgcaaggaaatttcaataaaactaatcttgatttccgcaaggagctttctgcgcttcgttcatgcacttcggcgaaacaagccccaataccaaataaccaattaaaactaaatacctatccacaacaattgcaatgcagcaattgtggtataaatctaacaattgatgaagggttaaaaaataagaagtacattaaatgcctttcttgtggttgtattattcaaaatcccatctacatacaaaataaaaaaaataaagaacgccgacaatggatagcggtattgatttttcttgttgtggttataattttcaatatttcaagtagagaatacagcacttcttcaaagggtaacaatagaatcgaaaactacgggagcaacaaaggaccatctcaaacaaaagctatggcaggagtaagggtctatcttaaacggcattatcttaaagaccctgatagttatgaaggaataagttgggaagcctttggtatatataataaagacaataatacttattttgctcttcataaatatagggctaaaaacagttatggcggttacgtggtggaagagaaactttttgtattggattctgacgggaatgttataaaagttgtagatgacatgaatgaagtcattaatggttattgatataaacaatgaacaaacaatgaagttatgaaggagcaaaatactgaaagactttctgaatatgagaaagcccaaatagagtttgcaaaaggtaaagcggagtttctacaaggatgtggcggttgcctgatgatcccaatcatcattatcattctactttgtatagtaattttaataggtctaatcgcttctccttttatggattaatcaaaaaatttaattctaacttaaataatatggcattatgaaaaaaattattacttctattttcattttgatgttttatcttggttgttcaccaccacagaaggatgtactgtttgcaaacgcttccgatgaacaaatcatagaatggggtaaacaatacgtagtccattccattgaggatagtttaaaagaaggagaaagttacaaaataatggaatggattttggcagaaaaaaagacaagtattcccgttgaggtatggcaaatggataatacatataaaaaagattcaatatcaggatgcgtcaagctattagatacacgaggtattttcgatgaactcgcatttataggaaatggtgatagcgcatttgtagccttcgctgttgcatatacaatagatgaaaagaatgggaatagttcattcttagaaaaagtttttaccctcgataaaagtggtaaagtgttggattgtagcgattacctcagcccttctcaaaagagaaaacaaatagaagaaaattttaacagagctttggaacagatgggtcctattctgattcagacggtaaaggaaggtgcagctatggctggtaaagatacaagcaatgtaacaagtataacgattaatggaaagacatattccgaataatttataatattacgtattatgaagacaaatgaacgtattttaagaatcaacagtgtgttgcgagattattttgcgaaacatcctcaaagcggaatgatccttgcaaaagagtttatgcctctttttataaagaatggcattttcaataaagataatagagaggggttacccattcgaaaagttctgcgagatttggatactgaaaattcattggacaaaattccctatgttcatactgaaaggaaacctaaaacaatcaattggtattttcgtcctttgcttttatcgcttgtaatatttatgggtatgctttcgagttgttcttttaagtcaaataccgatttcccaaaagtgacccatgtagctttccaaaaagaaaaacatgggaaatggggtatggttggagttgatggaaacatcttgtttgaaaataaatttgacaaaagaccgtcttatgcagtaaatggagtgtttagaattcgggattatgatacaaatcaatatctttactattccgcaactccaactccccaattaataggaactcccaaaggttataagcaaggaggcatatgtagcgaaggaataattcctgttgtttctgcggatgaacgtattcactatctaacagaaacgggagaaactgcattttatttgcttccgtatcagggaaaggaattcttatgtgtatctccattctttacggagcaacgtgcttggtttcggttagaaaatcgtaaatgcggatatatagatccacaaggcaatgttgtgatagaacctatttatgataacgctttccctttccatgaaggaaaagctattgtatataacaaagaagctgacaaatggttagttatcgaccccaatggaaaagaattatttgaagccagttccaatggataccaacaatattcatacaccttttttgaaaacggatattgtttaatagaaaacttcttactcaatgaaaaaggcgaaaaagcacagagattcccctctaatatttatagtatttcacctttcattgacaatgttgctttatttcaagacagtaaaactggattatggggacagcttaacatacaaggagaaagtatcggagagcctaaatattcgcgagctttaggtattgtaggtgattggatatatgttgctgatacaattgctaatttaaaagatgactgggataatcaatatatgaatgtatatgcaataaattctaaaggtgaaattaaaaataaaatagaaaacgtttcatgtttttacccattatcccaatatatcataatggcagaaaatgagaaatattactttgctgacaaaaaagggaatccaatagacaacaactcttattacaaaatttcagttcccccatttacaaatgcccccagttactcatccttttggtcttctttaatagcacctcactccttgtctgattatgatgcttggggagttgcaaccaattatatagatgaaaagaaaacattggcatcaatattcgataaattaacatccgacggcattgacagcttaaaaattggtcaaaccattccaaaaattatggatttatacaatataaaacaaatgccaacaagtggaatgattgacttgcataatagagattggggcataaatcaggtttttgcaacgtattccgttggcattcttcatgaatgtgagtgtgtaattgtgattaaagtaaagattgatgcgagtgcttctccgataggtgataatccaaagaaattgtttgatgctataccacaatatcttacagaaactttgggattaaaaagggaagatgaaaccctttatcgatctgaagatgcttgttatgatattgtttattatgaaggagaggattcattctttttaatgtctaaagcgataacagagaaatagttaagaaacattcatataaatcgaacacttaaaaatattcccgtacagaacatcaaattctgtacgggaatacttttatacataaaaaataattatctaagtattgtggacctggggagaatcgaactcccgtccaaacgaggaaaccatatgctttctacatgcttatctttgcctaaaattttcgaacataagcaagaccaaagccaccaacttatgccttatcctctaaaatttcgtaagagttacgaggaaaaactcaaactattcccgattttactgtgccactttatcaaacgcttcggaacaagagcttttgagtgacatctcgtttctaccactttggcggaaataaagctaatctactatacttcgattaagcagcgagagcataattttcgttgccagataaaattttgataactgatatttaagtggaaattaccgacccactgcatgcttacataccattccaactcgctgtcaattccagtcaagccctaatgatgtttcaaagataggaaatcgccttgataagaacaaacaaaatgataaaaattaaaatagaatatcacaaatcatcacaatagttaatttatttaagaaaggcagatagcttttgatataaagaatgataatcagactatcatttttatttcagggtgcattttggggtgtaaacaatataaacacctgattatcaatattgtttatggagctggagggaatcgaaccctcgtccaaacgaggaaatcataagctttctacatgcttatctttgcctaaattttcgtgcagcggcagaaccaaagccatcaaccgttgccttatcctctaaattttcacccgcgccacgaggctgacacgaactatccccgatttgactgcaccactttatcggaatgcttcggagcaacagcttccgagtgatgtcacgtcccagcacctggtgccgggattaagcttcaatctactatacttcgattaagcagcgagagcgtaacgagtttcgccagataaaattttgaggactgagattaaagtgcaaatcaacgacgcactgcatgcttacttaccatttctgcccgctgtcaaatccagtcaaccccatgactttgtaacagtctgaaatttaaaagattgcgtaactcattgctaagtagggagggtgaaaaagggataaatgctactttatttttcatcctctaccgctttctttggcacaaagatacatattcttttattagcaatcaccatatatttacaaatattagctaatactgacttttcgtgataaaaacaataatcctccatacatacaatatgtgcaccccattgtcatcaatgttcaaacagctaccaaagccagtatccgttgacggaattaacccctgcaagagggaatctctatcttctgtaatggatatttgcacagaagagatgggaagttaacggaaaaagtctctgaagttaactgaaaaaccggaaagaattaaggaagcaatctatcccaaactttggttttttcatacccagccttgggatgtctaaaccaaaccttggtttagacatcccaaggttgaaaagaaagttcttccgtacaagtaacaattccgccaacagattcctattatataaatacaccctcgtttaacagatgtagccgtaatacttgtatacaccgcgattgcatctacttttcaggttattatagtgttctctctttctttttaaaagtgaatgatatgtttcgtctaataatgatttgaattccccggtagcgtcttggaggatatttttagtaagaggaagacccttcggacaataaaagccgatacttcggactattttatccctttatttcacacattagccgtatttttgtcaacaaaagaaacaataataaccaagagatttttagaacatatcatgaagaaccttattgccctaaccctgctgcttggaggaagcacactgctctgcgcacaaaagcctgccaaaacaccggcaacctacaagccggtgaaaagtgaaatataccgcaaaggttggatagacttcaacaaaaacggagtgaaagacgtgtacgaagccccctccgccccgctcgaagcacgcatcgaaaacctgctgcaacagatgacgctggacgagaagacctgccaaatggtcaccctctacggttacaaacgtgtactgaaagacgacctccccacccccgaatggaaagagctgctctggaaagacggcatcggcgccatcgacgaacacctgaacggcttccagcaatggggactccccccctcggacaatgcctacgtctggcccgcctcgcgccacacctgggcactgaacgaggtacagcggttctttgtggaagatacccgtctcggcatccctgtagactttaccaacgaaggcatacgcggcgtggaaagctaccgcgccaccaacttccccacccaactgggactgggacatacctggaaccgtgaactgattcgccaagtaggactcatcaccggacgcgaagcccgcatgctgggctacaccaacgtctacgcccccatcctcgacgtaggacgcgaccagcgctggggacgctacgaggaggtttacggcgaatctccctacctcgtagccgaactgggcatcgaaatggtgcgcggcttgcagcacaaccaccaagtggccgccaccggcaagcactttgccgcttacagtaacaacaaaggcgcccgcgaaggcatggcacgtgtggacccgcaaatgtcgccgcgcgaagtggagaacatacacatctaccccttcaaacgcgtcatccgggaagctggcatgctgggcgtaatgagttcgtacaacgattacgacggcatccccgtgcagggcagctactactggctcaccacccgcctgcgtagcgaaatgggattccgtggctacgtcgtatccgacagtgacgccgtagaatacctctacaccaagcacggcaccgccaaagacatgaaagaagccgtccgccaaagcgtggaagccgggctgaacgtacgctgtaccttccgctcgcccgactccttcgtccttcccctccgcaaactggtgaaggaaggcgggctgagcgaagaagtcattaacgaccgtgtgcgcgacatcctccgggtaaagttcctcattggtctgttcgatgccccctaccagacagaccttaccggtgccgaccgtgaagtggaaaaagaagagaacgaagccatcgccttgcaggcatcccgcgagtccatcgttctgctgaagaatgccggtgagctgttgcccttagacatcaactccaccaagaagattgccgtctgtggtcccaatgccaacgaagaaggctacgcgctgacccattacggcccccttgccgtagaggtgaccactgtactggaaggcattcaagaaaagacaaaaggcaaggcagaggtgctctacaccaaaggctgcaacctagtggatgcccactggcccgaaagtgaaatcatagactatcctctgaccgacgacgagcaagccgagatagacaaagccgtagaaaatgcccgtcaagctgatgttgccatcgtagtattaggcggcggacaacgcacctgcggcgaaaacaaatcgcgcaccagcctcgacctgcccggccggcagttgcaactgcttcaagccatacaagccacgggcaagcccgtcgtactgatactcatcaacggacgcccgctctccatcaactgggcaaacaagttcgtccccgctatcctcgaagcttggtatcccggctccaaaggcggaacagccctggccgacatcctcttcggcgactacaaccccggcggaaagctgacagtgaccttccccaagagcgtagggcaaatacccttcaacttcccctgcaagccttcttcacagatagacggcggtaagaatccgggactcaacggcaatatgtcacgcatcaacggagcactgtaccccttcggttacggcttgagctacaccaccttcgagtactccgacctcgacatcaccccccgagtcattaccccaaacgagtctgccaccgtccgcctgaaggtgaccaacaccggcaaacgcgccggagatgaagtagtgcaactctatatccgcgacgtactgagcagcatcaccacctacgaaaagaaccttgcaggtttccagcgcatccaccttgaaccgggcgaaacccaggaactatccttcaccatcgaccgcaagcacttggagcttctggacgccgacatgaaatgggtggtggaacccggcgacttcgtgctcatggccggcgcctcttccgaagacatccgcttaaacggaacgctgaccgtagaggattatcagactcgagccaaagccattgaagtccaaaaaccgacaaagcgtgtgaacgccagcactaacccagaggatgccgaaaacgtgctcgacgaaaaaatcaataccgtatggcaaggaaataagggagattatattacctttgccctaaagaacggagccaaggtagataaagttgccatcgcctttacacgcgacaacaacctaccggcaaccttcgaaatccagctctcgggcggtggcggacagttcctcaccgtatattcgggcaccgtcagcgaatatggcaagctgatttcctatccgttcaaaggcactaccgccagcgacctccgcatcgtgctgaacgatgaccgcgtcggtattgccgaagttaaattttaatgtgctaatgtgccaatatgctaattggctgcgctgtatatgccgcaggggcattggcacattagcatattgacatattagcacattaaattaatgaaaacacttcttttctgtatgctcggattaggtttgacagcatgtggctcttctccaaagggcactaacggtggccaggacgaacttgccatgctggtaggtacttacacgaatggttcaagcaagggtatctataccttccgctttaatcaggagacgggaacagccgtcccgctcagttcagcgacattgcccaatccctcctacctcgttccctcggaagatggcgaatttgtctatgccgtcagtgaaatgaacgacagcacagcagccctcagctccctttccttcaatcgggaaacgggagaactgcgcctgctgaacaccgttcccaccttcggcgccgccccctgctacgtggccaccaatggccgggaagtgttgactgccaactacagcggtggaaccatgtccgtctttcctttacagaaagacggcactttggcccctgcagacacgctctttcaaggctctgccaccggtcccgacgccatacgacaagtcactccccacatccattgcacggtcttttcaccggacggaaagtacatcttcgccaccgacttcagtgccgaccgcatcctgcgctttgtgatgcaccccgacaaccctattcctcatgcttctttggaagccgttaacattgaggaggattccggcccgcgccacctgacattcagtcccaacgggaagtttgcctatctcatcaccgagttgtccggcaaagtcatcgccttcagttacgatgacggccgcctggaacagatacaaaccactacagccgacaccgtagccgcccgtggaagtgcagacatccacctcagtccggacgggaaatacctctatgccagtaatcggctgaaagaagacggcatcgccatctttgccgttaatcccgaaaatgggaccttgacaaaggtaggttatcagccaaccggcatccatcctcgcaacttcaacattacacccaacggcaaatacttgcttgccgcctgccgtgacagcaatgtcattcaggtgtataaacgaaacgaagttaccggacttttagaagacactcatcaggacattgtagtcgacatgccggtttgcgtacaattcgtcagatctgttaataatttataaagcaatatttagcaaagataacttcattaactttgtcccttagctaaatcagtctaaacgaatgtagattatgaaaaagaatatattgatactctcagctctgttcttgtctaccactgccatagcgcaaacagacgtaaccaccggtgtgatgcgtggcaaagactatggagtaacctatatgttgcccaaaacagaaatagaaatcgtattgcaaaccaccaagcatacctacactcccggagaattttgcagatatgccgaccgctatctgcgtctcaacaacgtgtctgccgaaccggaagagttctggacactggataagatagaaacccgtatagccggtataccggataaggacaatgtctatttcgtcaaaatgaaagacaaaaccgtggcaccccttatggagcttactgaagacgggattgtccgctccatcaacattccgttcagtgacaagcctgctgccaagatgcccgtagctaaagccaccgaaagcaacattgacccacgcagttttctgacagaagaaatactgatgtccaactccagtgccaagatggccgagctggtggccaaggaaatatacagcatccgcgaaagcaagaatgccatcctgcgcggtgaggcagacaatatgcccaaggacggcgcccagctcaagctgatgctcgacaatctgaaccagcaggaaacggccatgacggaaatgttctcgggcaaaataaagaaagaacccaagacattcactatccggttgacgcctaaagagatgaaagatgaagtggctttccgtttctccaaaaagttaggagtggtagctaataatgaccttgcaggtgaaccgtattacatcagtgtcacagacctcaaaaatcccgatgtatctgccaccgaagaaagtaaaaagaaagtggacggtgtagcctataaccttccgggcaaggcacaagtgacattggtgtataacaataagaaattgtttgatgaccaacttcccattacccaattcggcaccgtagaatatctcgcaccagtactgttcaacaagaattcaaccatcaaagtgttgtttgatacggcaacgggaggactgataaaagtagatagggaataaagaaattctaatcccggatggtcaacaggataaatccatccttacgcaattgcattacgtaggcggtgacccggggaatataattctcttcctccccgaagtgcctggcaagtagagaaatgatttcgcgcacggtacgatgtccgtctatcagatcccagacggctgtgccgtgttcttccagcctcacatggatgtcaggagacatccccttcggcaataaaaaacgacgcatccattcgtatttaaaccgtgggtaggcgagtacggcgcactcaccttcccattcggttgttatatgtccacagcggaccggaacagcgtccaacagacttacttttccttcgggtatttccatcatatggtatccgcttttcctattatttctgaatattaggctcttccagcttataaccatacttcctgtccgccttcttcagcagtagggccactacaagggacaagcaggcaataccggtaaatatgcacataggcaccgtatagtcatacatattcgttccatcaggtttcttaccggatatacaataggcatcaagcacccaccctatcaatgtaggaataccccaaagaccgatattctggataaagaaaatcaatgcgtatgccgtacccagctgacttaccgggaatatcttggccacagccggccacatggcagaaggtaccagcgaaaaagcgatgcccaaaattatcatcagcacaatagctaccaaccaatagtttatatcgggaatagcataaataaaatgtacacatatcagcatggctgaacccagcagcatgatagatgcggacttgccccgcttgtcaataaaaccaccaaagaccggggtcagaatcagcgcccccaatgccggaagtccggcaaacgtaccagctacattctcattgataccgtatttgataatcatcaactcggaagcaaatttctggaatgggaatacacaagagtagaacaatacacacagcaatgctatcagccagaaaccgggattgaccagaatattcttcacatccttaaaggggaacttctcttcctcatcttccgtaccggcagcaatggcagcagcttccatctgtttgtccagcttcttgtccatcactgtaaagacgaagaaagcaatcataccacccaacaacagaaccaagcccaacaacaccggtgtggaaataccgaaagcacgggccaaaggaatggctactgcataaccggcctgcgaaccgatacgtgccaaagcaacttgtacccccatagccgtggcaagctctttccccttaaaccacttggctatgattttggaaactgtaataccagcgacctccgctcctactccaaagatggaataaccggcaaaagcaacaaacacccctgttttatagccaaatatttcattgattccaaataaagtcgcgtcggtaccggcaagtcccgtcattgcatagtattcaagtgctgtaccacctaccatcaagatagttgccagctttccggtgaagcggatgccaaagcggtcgaggattaatcctccccaaatcagcatcaggaaaaaaacattcaggaaactataaccaccggtaaagaatccgaaatcagtactcgaccaagccaagtccgtttccaacattgtcttcaatggcgctaccacgtcgtttacataataagctgccatcatcgtgaaggcaacaatcaccaatgccccccaacgggtagccttggaatcattcaatttaagtttgagttgttctgtcattgcactatttaaatttcaatttattaatcagattacataagttgctgacaaaggtaaataaatacttcattaaaacgaaaaaaggttgacaccttttcagtatcaacctttctcttatttttccaagcgggagtcatccgcaatatccttatcttattctgctgctggggcttctgctgcaggagcaggagcttcagccggagttgtagctgcaggggcctccgattgcggagcttctgtacctacgggcatgttataaggattagttttttcttcttgttgcgcctgttccagaatcacatcaccgcccttacctgtggaagaaggaatagtgtaagcagaaacaatactgaagactaccatgacagctgccagagtccaagttgctttttccaaaaaatccgtagtcttgcgcacacccataatttggttggatgatgaaaagcctgatgccagaccgcctcctttagaattttgaatcaatacaatgaagcacatcagcacagatgcaatcagcattaagataactaataataaatacattttgttattttgatttagcgttaataatcaatttctccaaaaatctgatttggtctgcaaagtaagcatttttttttggataattcaaacttaattttttaataatttcaagtgccttgtcatatctgtgctgttttatatagattttggctaaagtttccgtaaaacagctatcgtccaattcttccgttaccggcgatacggagcgctcttcctcttcttcagtctcttcctccttctctacaagaaactctcttctcgtattcgcgacatctggagactcactcttttgaataaagtcatctatcaattcatgtccgcgcagtttaggtacttcctgctcattttctgcatctacaccaggttcttcctgcattaaataggccgtataatccaccgcataatccagctctgtatgctgtgaatgctcttcgggaacagtagccaaaaacgcatctatcaaggaaagggtacggtctacactcggctctttctccgaatcgccggaaaaaagcgacgagaccttctgggatttcaaagtatagcggtcaccctctataaagtaaaacaacacacgacggtctgccacatacaacacagccttgcgcagctccgcgccaaagttgatgtcgtgcagcagatagaggtttttcagatagagcaaacggagcgactggaaataaggatagcgtgccaccaatgtgcgaagctcgtacaaagtatccctattcagcgtctcgggatgctgaatccattgttgcaaatgggtaggcgtcatgagtttaccagttagctatagttgcattgaaaatctgttcagcaatgtccttcaccatcagggttatcagctggtcctgcacatcggtcaacaattgtgaggaatcataggtctggaaagccgagaactgctgttcaaagtcctcctcatggttcgtgttattggtgtagcgcacgttaactgtcagtgtcaccttcaccttcgaagagaaaccgctggcatccaccgattcattatattggttgtaaccggttatttctccgtctatgtccaagtctcctccggagttcaccaattgcaggcgagtctgctgaatgaacatatccttcattttctgattaaactctgttgccaacggtgcatatacatactctgcccggttctggaaatcggcaatggaaatcgtttttacctttgtatagtcaatagagcttatcggagcaagtcccaacttcatactacatgaattcaccagaaataacaagcttaccaacaaggaagcaaatgccgcttttttaatccaatccatattcttttatctttctgtataacgtacgctcagagatattcaaatcctgagccgcactcttacgcttgccgtgatgtttttcaagcgctttacgtatcatttctttctccacttcatccagggagagtgactcctccacatattcttccgtatcctggaagtcatcgtccactggagtaaccggcttcaccgaaggatgtataatagtagggacactggatgtcaccggaggtaccaccgccggagtgaccggcgcataataggtagatgtggcaaccgtcggattggataccgttcccctttcagccataatctcatgcaccagctttttcaagtccgttacatcctgacgcatatcaaacagaacctgatagagaatttcccgttcacttccgaagctcttgtcctccttcactccaaagaaggcaggcaggcgctgcatattgttctgctcaggcagatagcccttcagtatggatgcattgatttcacgattggtctcaatgatggatatctgctcggtgatattcttcaactggcgcacattacccggccatgagtagctcagcaatacttgcttgccgtcttccgtcagctgaatggcaggcatacggtacttctccgcaaagtccgaagcaaatttgcggaacagcagcaccacgtcttcaccgcgttcgcgcaatggaggaacctgaataggtactgtgttcaaacggtaatacaagtcttcacgaaagcgtccgtcagcaatggcctgtgtcaagtttacattggtagcggcaacaatacgcacatcggtcttttccaccttagaagaacctaccttgatgaattcaccgctctcaagcacacgcagcaagcgtgcctgggtaggcaaaggtaattcgccgacttcatcaaggaagattgttccgccgttggcttcaccgaaataccccttccgttcaccgatagcccccgtgaatgcacctttttcgtggccaaacagttccgaatcaatcgttccttcgggaatggccccacaattcacggcaatgtactgtccatgcttgcgccggctgtattggtgtattatctgcggaaagctctcctttcccacaccactctctccagtaatcagtacagacaagtcggtaggcgctacctggatagcgatatcaatggcacgcatcagcgcttcgttattgccgatgatgccaaaacgtaattttacttgttgtatttccgcttttgtcattctacaaatcttcttctacactatcgagtttcagtttgtcgctatcgtcacgtttctcgtaatattgcttgcgcagcggatttgcatgtgcctctttctcacgctggcggttacggaacacatctatagccacatagatagcctgccggaacgaatcttcagaggcaattcctttcccggcgatatcgtaggccgttccatgagcaggcgaagtgcgtatcaccggcaagccggcagtatagtttacgccctcgtccatagccaatgccttgaacggtgccagcccctggtcgtgatacatggccaggataccatcaaaatggataaagttatctgagcccataaacccgtctgccggataaggaccatagcaaagcatacccttagcagccatttcgttgatggccggaatgataatctcctgctcttcagttcccagcaatccaccatctcctgcatgcggattcagtgaaagcactgcaatacgcggtgcgccgatagcaaaatcctgcttcaaggagcggttgaatatcttcagtttttcttgtatcagttctttggtgatgcttccggctatctctttaacgggaatatgtccggtcaccaatgctacccggaagtcatctttcatcagaatcataagggccttctcgccatctcccaatttctgctctatatactccgtatgtccggggaaggcgaactcctccgactggatggtgtgcttgttgatgggagctgtgacaatcacgtctatcatcccctccttatattcctcaatggctttttccagtgcaccaagtgcagctttaccagcttcaacgtcaggtttagaaaactcaacctttacttcatcatccgtacagttcactacactcaagcgattgggagccgcttcggaagcggagttgacgatactgaagttggcaggcaagtccaatgatttacgatgataagctgccactttaggcgaaccgtagataatcggcgtacacaattccagcatcaccgggtctgcaaacgtctttaaaatcacttcataccctacaccattaatgtcgccttgtgtaatgccgactcttattttgttatcttccatttttattacttattattagtagtatcttttgcggttacacctaccggaatctcctcaccttcctgcttactgccgggcagtttcaaggtatagagcgaagcctccatctgacgcaccagattacgtttcattttatcaggtgaataaataaatatttcagatacaattatacgctgattggctttgtccaaacgtacatgcgatacgaacggaccacccatgaaatcacccttcacacgccacaagccgcgggcctccagtgcatagtctccctgcacactgatgggacgtacatcggtcatcagagaatccgtcgacatatacataccttcttgggcacccgggatattgattttcatcacagaatcgcgtttatgaacaaaatattctttagtaaacgtatccttatccgtataaggataagagtagattacaaagttctgatcaccggtagccgcattcgtacctgcccagaagaagttctccccctccttggtagatgtcagttcgcccggcacccatacatcgcaatcgaactggcttttcaccttcgttgctatatagtcgctatgcttgtccttcaatactgaaatctgacggttcatttccgcatgggtaaagaaatcgatgattacctgcttgttctcctccacaaatttctcgaacgaaacctcgtccggcgcctgaatagtgagaatagactgaggagcggcatacacattccttgcatacttgaatttaggctgggtatagagatccttattcacatcgacaataatgatattgcgaatcagttttaaagtggcatcataattggaaggggcagtatacatgattcggaatgaacgttctgactggggaagccccggaacatcagaatcaagcacatcgaaaagcgccctaccggcaggacgttcccacaagccgggctccaccactaccagaacttcatacgcacgaccgctggaggtcggagtaaacacaccctttttaccaccaccgcaggcggaaaaaagtgtcagtacgagaaccatacttaaataaaacaagtgctttctcatatctctatcattttagtttttcacaaagctacgaagaatgcgtaatatcctccctacctaagttaataatttatattaattcttctttattctcctcctgcttggcagtggacaacatgccacaagcggcaaatatatcctctccacgcgacgaccgtatagtggtaaacagaccgtgagaagtcagataatcacggaacgcaatcatggtttccatatcggctccctcaagattcaccccaggtatggcatgaaaacgaatcaggttaatccggcagtccaacccacgtagcagcttcagaagttcctttgcatacggtaacgagtcattcactcctttgaaaacaatatattcaaaagatagtctgcgctgtttgctaaaatcatagtttcttaacaattctacaatctccgtgatggagaacgccttctctgccggcatcagctcgcggcgttgcaaaggtatcggcgaatgaaggctgatagccaggtggcaatccgattcctcaataaaacgcagcaagcccttcttcagtcccacagaagaaagtgtaacacgcttgggactccacgcatacccataagaggcggtcattatttccagcgctttcaatacctcgtccagattatcaagtggttcgcccatacccatcattaccacattggtcagcttgtccctttcgggcaacgaattgatctggttaataatctggttagatgtcagattggcggtaaaaccctgcttgccggtcatgcagaatttgcagttcatcttgcagcccacctgggaggagacacaaagcgtagcccggtcttcgtcgggtatatagacagcttccacaaaatgtccctcgcctgcccggtacaagtatttcaccgtaccgtctacagagcgcatggcatctaccggcgctttggcacctacctcatagatttctttcagcaattcccgatgcttcaacgaaagattgctcatttcgtctatagaaatcaccttcttgtcatacagccaggaagctatctgcttggcagagaaaccgggcattcccagattcttcaccacattctgcaattcagagagcgtcaagcccaatagaggtcgtttctgcatatcgtttttcattaaaacaaaactctttcaagaatgcaaaggtaggaataaagttgcacaaagacaacggagagtgtagaaaatgaaatgtacagacaatgaaaaagccgcccggaagtaccggacggcttttcaatatattttttctattcttagaagaataaataacgttggtcttttacgttggctttcagatacaagtcactgatgaactggcttgccatgcgtgcatgcatgttggccaagttatcctcttcagtttccttgttgaatgtttcgttcagtttctcttttgcataaggttgcagaacgaatacaccaccattacccttgataggagcactcagcttgttcacttcggcaatagaagcgtatgcgcctaccagaggttcgctgctacgcaatgccgggatataggcaggagcagagaaagtaacgtgctttacagaatcactgacagcatttgccatattcttatactgctcgaacgaagttgcattggcagccttcatatcagccataatcttctctgctttcttgtcacggagaatttcagctctcaactggtcttttaccaaagccagtgggcgatagccttcaggaacaatacttgcaacacctactaccagcatatggtcgctctcgccacattcgtacaaaccggaaacttcaccggcttttgcctcaaacacccatttcaaagcatctttggtacctctgataccaccgataccatgttcagagctgtacaagtcggctctatccagcaacttataaccagcatcttccgcattagcaatcattttctctaaagtattgtttgcagcaataaactggctgaactcattgtatgccttactgtaagtttccttactgaattctaccggacgcttgataacggctaccttatatttatccttgacagccttcttgttggttacctgcaaaatgacatttgcctgtcccaacgccaagttggtcagctcgttctgtcccaaagtagtgacagcagtaatatatttcaagttgtcaccgtcaatctgtgcgccttcgtaattagcagaagaaatccaggtaggctcaccggtctgaccgtattttttcgcaacttcagcaaagctggcaccctccttaatagcattgtagatgctgtcggccaaagtcttcgtcttttcagcatcttcagcaaccacttgaatctgacggaactcgatagagtccggcatggcagcagtagccaatttcttgaaagagttgagagtattgtccgatacgttataataaggtccgaacacaccacccaccgcaacagagtccaaacgggcagtcacatcagcgggcagagacttagtagtgtagaacaagtctgtataaggagtttcggaaccggtagaacggatgaaggtagtatagtcagaaggattggcaataagttgctccgtatattcctccatttccttttggagagcagctctgtcttctgcacttgcagttacctgcacatcaataaacttaatgttacgggtttccacatattgcttgaattgctctttcttcttatcgtaggcagctttcaagtcagaatccttgatgacaatagtagaatcaacaatagaagaatagggaactgctgcaagcaacaggtctgactgatccactcttgcatcaaatgcatcctgagcttccacaggattggagaagagagatttcgtaatcaaagcctgatacttttcctgaagacgagcctggataagagacttctcaaggaaagaccagaacttatacatagactcataatactctgcataattggaaggcatctgtgccttgttcatcttggaatagtctactaggaacttcttcaacatatccttatcgaacgcaccggtctggggattacggaacggagtctgttgcagcatcggatgcacaccggcatcaatgatagcctgaacttccgccttagatacagacaagccaagtttcttagcttctttttcaatcagtttattattgacgtatgttctccatacttcatctttgattcggttggtttgttcatcgctcaatgcactgttgccactggagaacttgataacttctgtatattcttctaccaatgcttgaaaatcctgagcggaaattgtctccccgttcacttcaccaacgtcttgtgactggtgtggctgaagcactttccacgcgtcacctgcgatgaaagcaaacagcgccaaaccaataacaatcaccaataaaggtcctttagaccgaatgttttgtaatgttgccattttagttaatatgatttatttgtttattattattttcctaacatgttcattttagcgcacgaagatacaaaaaatgctaatacgcatccatttattctttaaaaaattacgcctaaatgaaattattcaatgactttcagtcttaccaactcaattttagtagctgtcaccttgattattttaaactgataattatccacttcaatcacttcatgcagcttcgggaaactttgataacggttcagaatcagaccgcccactgtcagataatcgtccgattccggcaggtcgagcccgaaagtctcatttaccttttctatttccagacgggccgaaagcacatattcacgttcacccagctgcttacatacataggacgtattatcatgctcatcctcaatatcgccgaaaatttcttccaccaaatcctccaaagaaacgatgcctgccgtaccaccaaattcgtccaccactacagcaatcgtttttttctgctgcatgaacagtttcatcagtttgtgagccgacatcgtttcgggtacaataggcacttccttcacgttattcttccagtctaccggattcctgaacatttccgacgagtgaatatatcccaccacattatctatatttccatcatatactatgattttagaaatacccgactccacaaaaagacatttcaattcttccaatgtggtggtcagatctacagctaccacctctgtacgcggtacaatacagtcgcgtatctttatattcgaaaaatcaagcgcattttggaatatctttacctctgcatccagttcttcttcactttccgcattctctatgctcgactggatgaagtaatccaaatccactttgccaaaagccttggccgacgcttccttgtttactttcatcccaaatatccgaaggaacagatacgacaatcccgatgcaaattttgaaacaggaaacagaatgacataacatataaataaaggaatggcacacaccctcagcatcagattgggattgattttaaacaaagtcttcggcaagaactcaccggttaccaaaataataagagtggaaattatagtctgcaccaacaccattacaaaatggttggaaataattccggcaagaagattcacctctatgatttgtgccatcaagataccataaatgacaagcgcgatattattaccaaccagcatggtcgagatgaagttattcgggttgcgaagaaaataggaaatgataccggaagtgacgcctgacttcctttccatctcaaagcgcagtttatctacggaaacaaaggcaatctccattcctgaaaagaaagcggagaaagccatggttatcaataaaaaaataacggtatccattttatcaatttatggtatcagtctgcaagctatctgctgcggcagcctcttcgtcaacatagaagatgccctccggcttgcgaatcgtgtaaacagtcatttgctgattggattcaaagccatgtcccgtaatgatacggtcaggctgttcgatacggataaactcatccgaataaattctttgtgtccgctggtcccaatacagcaactctgtatcaaactgctcacctttcaaattctgtatatgcacattccccatcagtttccataactcttccttattaaagaaataggctgtatcggccttgatacttgcctccacttggaagatagagtcaaacttttccaaatagacccccttttcaaaagcccagtatggaggattcttccggtcaaagaccagccactcttccgtattgatgcggtaacgtgttacaccggaatcagacactagcgtagtcaccccgcgggtgtccatcaccgccatagaatcacgctcggtaatggcatcgcccagctccttcttcttcccggaacatgaagaaaataaaagaagcataaccattgccccaaagacaatggttatgctcgcatttttatgataaacaacgttgatgagttgtagcaacatagttttatctgatagttgtagattcacctatccatccgccgatagtgatacggtcaccagctttgtaacccaacataaagaggtctttagcctggggagtgtgacgggaataagtactaatcagctcgttagcacgttctgtaactgaaggatccaccgctttagctctctgcaacttatcaattactacaaagtaagtacacttattcagagctggctcgtcagtccaattaggattggaaccgtaaagctgtgccagcaagatataaggatcaccatagttttccttaaagctaatagccttctggcaatatgctcttgcctgagaaagtttcttagcctgcatcaaagcagcagcagtggcatatgccatttcagctttcttgtcattatcggtttccttagccaatgcttcgtcaaagtatttcacggcattgtcatagtcaccttttttatagtacatgtatgctacacctacagcagcatcggcagtcgggtcaatttgatacatgtattcagaagccttgaaataaacttcactttcgttacacttcatcaatttcaaaatattcaatgctttcttcaagaaagtagagtctgtcttattttcttctactttagggccatagatattctgcaaagattcacaatcagccacaccactctggatgaacatagctaccaaattatccttgatagtttgcaggtttgccttctttgcctctttggtttcagctgcgatagcatcatccgcatacttggaagcatcaatatagtcttggaagaactggtcagtatgattgtcatctgcctttaccttctgcatagaaacatccaagaaatagtgtaaaaccgcacctttggagccgcccttttctgcttggacagattctttcagccaattgtaagctgtattaaggtccggagtcggagcaaattgaagataatccactgctttggcacccaaagcatcagctacactcggcacccccttcattcccttgttaacaaattcaggaatgtacttcattctcaagtcatacacatccatcagctcatcaaaatacttcttataatcagcagaatttctatctttaatctgactcaagaaacccactaaaatcttctgagcatctgtaaatgtataataccgcagtgtagggcaatccttcaatacagccatacaaggagcgtatgcatccttaaagttaccagctctcactgcttcatgagagatactactgttcgaattacaattttcagtctgtgcgaaagtactggtcgctccacccgaaaggagcaagacagccacaagcgtcttaattttcattgtatttaaattttagttgttatattttttgtctattcaatttccattaatccactttacgcttgaagaaccagcgttcgttaaaggttactccgatacaaatacgcaatgtattttcgttcaagaacgcagcttgggttcctttggttcgcacgtattgcgcagaaaggctcaatacggaacgggttctcggtataggtaatccaaaaccggcagtaatgccatattcatcagcggcacgtacaccgtctatcttataataaggcttggagtaataagctcccaaacgatacttcacatgagacaaataacttcgtcccataggattcggcagatattctgcaccaacggatactcttccacggtcgcaaaacgcctcgtcattattcatatagctcactttactccaattttgaaacatcacatccgctcccaccgtcagacgatcgtcgtacacgtatgtcacacctgctccaaatgttgttggaatgccgcaagtaacaatagtgtcccttgttaccgaggtaactcccgtattactattgccagtctgcgtaacttcgtacgcatcgttgctcaaatcatgccccggagaaaatacgattcccaatgttgcaacatgcttttttccaaactggtgggtgtactgtgctccaaaatccaatttatagctctttacagccacattagactgtattgtaataggaaatacactagaactggacggaaaggtttccgcagcggttcttgttatatctccccaaagatacgaaaaattcgcaccgacggaaagatttttaattattttaaagcctgcacctaaataaagctggtgcagacctccttctcccgaatagcttaccgtcgtagatttgtctgggaattccgtatcttcccggtactctcccatgctgtatcccacattcgaataaggcaataaccccaagcttatggcagcccatttacttgcacgaaattgcatcgtgatgtaatcaaaactggaattcttggcattttgtttcagagtgccgttactgaggtttgtattctgtagagagactgctccatcaaagataaaagtcagcgaatctaccgccgtataggatgccggattagcaaagttagtctggtacttgtctcgtaaaccataggcaataccacccatcgccctgctgttacttgagccttgttcagacaactgtccatatccatatcgtgtatagggagaattcgtattattttgagcgactgccgctcctgataatatcgtaagcaagagcactaacagtgtttgtctatagcctgtcattattatagtttaaaattctatttaatcctttcaacactaaaaatctgtctgcaaagatgatactttttaagtttgtatcaaaagaaaaatcatccccgcccgttaaaaaaaccaaaagttcaggatatttatgcttcatagccgtaacgtaacctgaaatttcatattcaatacccttcagtactccggcacggatagccgtatcggtatccttccccatgggcaccatccgcccctcaagagtcaccattggaagccgtccggtaaactgatgaagcgccttgaaacgcatctgcaggccgggagagatattcccgccatgataacgggcagcagcatcgacaaactcataagtgatacaagtaccggcatcaatcaccagtatatccctgccaggaaattgctcattggctcctaccaccgccgccatacgatcataccccagcgtccggggagtttcatagaggttttctaccggaagagaagtcttttcattgagccacagaatgggaacagccataccttccagttgcgacaacacctctctgctcaaatcaatgacagtagccactatcgctttttcaatcgtatatgtacggcacacttcaggcaatcgttccaacgtcagattggagtcatacaccacctctacgatacgtccaccatcaaacaccgccatcttggcaattgtatttcctatatcaataatgagattcaccgtattgcataaatttagcggcgcaaagatataacattaatattgaaattcagcagaaactgcctctttattagaagagcaaccgcacaagaattcttattcatatccgtaccaaacaagcacaatgccactccaataatttgttgagatttattaaaaccacaacaccataccacaaccacctgattatcaatatagttgagatgcattacattcagtatacgaccgatccctattcagtatacgattgaatggcattcagtatacggctgaaccaggttcaatataccactattctttcacctatatcatttgtaaatagaaaacacttaccgctcgtacttggcagttgattcaaaacagccaattatgcgaatcaagaattgtatcaagttcataattaaaaaagattcttcggacacagatgactgggataacacgaataaccactttagttcctcatcacaaattgggataatattagttttttccgtaagtttgcagcatgaaacgaagcctacttatacatatatatatagtaatctttttcttctgtttgcctgcagcgaatgcccaggtgacacaacagcaaaagagtgctgcaacagactccgtgcgcgtcagtctactgacttgcgctgcaggaggagagatttattccctattcggacacactgccatacggtacgagaactatacgcgcggcattgacgccgtcttcaattacggcatgttcaacttcaacgcccctaacttcatcttccgttttgccttgggagaaacggattatcaacttggagtgaccgattatgagcatttcgccgccgaatataactatctgggacgcgatgtctggcaacagacgttaaacctaacagaagaagaaaaagaacgcctgataacactattgacagagaactaccgccccgaaaaccgagtataccgctacaattttttctacgacaattgcgccacccgcccgcgagaccagatagaacgtgccatcaacggcacgctgcaatacgctgacaatatgactgataacagtacgggaatctctttcagggatttgctgcataaatacagtgaaggccatttgtggtcacgtttcggcatggacttatgcatgggcagcaaagcagacgaacccatcaaccgccggctggcaatgttcgtccccttctacatgcaggagtatttcaataaagcgcagattgtggacaaagaaggacaagcacggccactggttgccaaagaagaaaaaatcgtagtaacgggtaaaacaccagccgacttcgtcagcagaggcatcacaccgatgcagtcggcttcgctattactgatacttgtagcaggcatcagcatttacggcatacgaagaggaaaaactctctggggcatggacctcatactcttcttggttgccggaatggctggatgtatactggcatttttagcactattctcacagcatccggcagtaagtcccaattatatactatttgtattccatccatttcaccttttttgccttccattcatgctatccagggtacgaaaaagggaaataagccgctatatgctggttaactttgcagttttaacactttttatagggctttgggcaataattccgcagagaattccgccagcaatattacctttggcactgtgtttgctgatacgttctgcaagcaacctcattctgacatacaaacgaaagtaatgaaaaaaggactgataacttccatactcgcacttacattcagtggtttgcaagcccaaccgctgcctgcctccccaaagctggtggtaacattgaccattgaccagttgcgtacagactatatggaagcattttcgtccttatacggagaaaaggggtttaagcgcttactgcgtgaaggtaaagtcttccgtcaagcagaatttcctttttgcggaacggaccgagcctcggccattgccgccatctataccgggacaacaccgtccatgaacggcatcattgcagagcagtggctggatgcaggtacactacgccccatagactgtgtagaagaccccaacttcatgggcaactataccgacgaaagcacttccccctcccaattactgacctccaccattgccgacgagctaaaaatagctacccgcaacaaaggtctggtttatgccattgcgcctttccgcgatgccgccatattgggtgccggacacgcggggaacggtgccttctggcttaataacaataccggaaaatggtgcagtacaacttattataatgaatttccgtggtggctgagtcaatacaacgaccggaaatctcccgactaccgtatcaaggatatggtatggacacctgcacttccttttaccaactatacatttctgcccgaatggcgtaacgaaccattcaaatacaagctggacggtgaacgggcaaacaaatttcgccgcctgattaccagtcctttcatcaacgaggaagtcaacctgctgaccgaagagctgctgaacaagagcactatcggacaagatgacgtacccgacctattatcgctgacttactacgcaggaaattacaaccaccggagtacgcaggaatgtgccatggaaatgcaagatacctacgtacggctggaccgtagtatagcttccttattagagctcatagaacgtaaagttgggctccacaacgtacttttctgcatcacctccaccggctatgccgacccggaagctgccgacccgggcgtatatcggataccgggtggtgaattctacctgaaccgctgtgccgccctgctgaacatgtacctcatggcatcctatggcgagggacaatatgtggaagcttattatgaccaacaaatctatctcaaccataaacttattgagaacaagcagctgagcctgactgaaattcaagaaaaatctgccgaatttctggttcagttcagtggcgtgagcgaagtatattcagctcatcgcctgcttttgggcccctggtcaccgcaaatagaacgtatacgcaatggttttcaccgcaagcgctctggcgatttgctcattgaaatacttccgggctggactatcatgcaggaaaatagtattgataaccgtgtagtacgtacggccgatattcctgctcccctcattttattgggaggaggaatgaaggctgaaatcatccgtatacccatcagtatcgaccgcattgcccctaccctggcaagtgtaatgcgcatccgcgcccctaatgcaagtacagcatctcccctcgacttttgattctaaaataatctgtgcaaatctggataatctgtatagaaatcagtaactttgcacgctcaactaactcagcaataataataaaaacaaatatataatgggatttaatgaatttttaagctcgattttcggcaacaaatccacacgcgacatgaaagagatacaaccgtgggtggagaaaatcaaagccgcttacccggaagtagccaaactcgacaacgacgccctacgcgccaagacagaagaactgaaagcctacatccacgattcggcagccgaacaacgcgccaaagtggaagaactgaaagccagcgttgaagataccgaactggaaaaacgcgaagacctcttcaaccaaatcgacaaaatcgagaaagagatattggagatttatgaaaaagcgctggacgaagtattacccaccgctttctctattgtaaaggaaacagccaaacgattctctgaaaatgaagaaatagtggttacagctaccgattttgaccgccaactggctgccactaaagactttgtacgcatcgaaggcgataaagccatctaccagaaccattggatagcaggtggtaacgatactgtatggaacatggtacattatgatgtacagctattcggtggtgtggttctacataaaggtaagattgccgaaatggcaaccggtgaaggtaagacattggtagctaccctaccggtattcctcaatgccctgactggtaacggcgtgcacgtggtaacagtgaacgactatctggcaaaacgtgactccgaatggatgggtcctctttacatgttccacggtttgagtgtagattgcatcgacaagcaccagcccaactctgatgcccgtcgcaaagcttatctggcagatatcacgttcggtacaaacaatgaattcggtttcgactacctgcgtgacaacatggctatcagccccaaagacctggtacaacgccaacataattatgccattgtcgatgaggtggactcagtattgattgatgatgcccgtactccgctgattatctccggaccggttcccaaaggcgatgaccaactcttcgaacagctccgcccacaagtagaacgtctggtagaagctcagaaaaaactggctacccaatacctggccgatgccaagcgcctgattgcatcgaacgataagaaagaccaggaagaaggcttcctcgctttgtaccgcagtcacaagtgcctgcccaagaacaaggcactcatcaagttcctcagcgaacaaggcatcaaggccggtatgctgaagaccgaagaaatctacatggagcagaacaacaagcgcatgcacgaggtgactgacccgctgtacttcgttatcgaagagaaaatgaacagcgtggatttgacagacaagggcgtagacttgattagtagcaatgtagaggaccccactttcttcgtactccccgatatcacagcgcaactctctgccttggaaaacgaaacagagctgacagacgaacagcgccttgaaaagaaggatgccctgatgaccaactatgccatcaaaagcgaacgtgtgcataccatcaaccaactgttgaaggcatacaccatgttcgagaaagatgacgaatatgtggtaatcgacggccaagtgaagattgtggatgagcagacgggacgtattatggaaggacgtcgttattctgacggtttgcaccaagccatcgaagccaaagaaggcgtgaaagtagaagctgccacccagacttttgccaccattacattacagaactatttccgtatgtaccacaaactatccggtatgaccggtacggcagaaacagaagccggcgagttgtgggacatctacaaactggatgtagtggttattccgaccaaccgccccattgcccgtaacgacatgaacgaccgcgtttacaagacaaaacgtgaaaaatataaagcagtcatcgaagagatagaaaaaatggtggcagcaggacgccccgtactggtgggtaccacttctgttgaaatctctgaaatgttgagcaaaatgctcaccatgcgtaagattgaacatagtgtattgaatgccaaactgcatcagaaagaagcggatattgtggctactgccggtttgaaatgtgctgtaaccattgctaccaatatggccggtcgtggtaccgacatcaagttgagtccggaagtgaaagctgcaggcggtcttgccatcatcggtacagaacgccacgaatcacgccgtgtggaccgtcagttacgtggtcgtgcaggacgtcaaggcgacccgggttcttctgtattcttcgtatctttggaagatgacctgatgcgtttgttctccagtgaccgcattgccagtgtaatggacaaactgggtttcaaagaaggtgaaatgattgaacacggcatgatttccaaatccattgaacgtgcgcaaaagaaagttgaggaaaacaacttcggcatccgtaagcgtctgttggaatatgacgacgtgatgaacaagcaacgtacagtagtctacaccaaacgccgccacgctttgatgggcgaacgtatcggtatggatatcgtgaacatgatttgggaccgttgtgccaacgccgtcgaagcacccgactatgaaaactgcaagatggatgtgctccagacgcttgccatggaagtacctttcaccgaagaggaattccgtaatgagaagaaagaaaaactggcagacagaacttttgacgctgccatggaactcttcaaacgcaagacagaacgtatggcacagatagcctatccggtcatcaagcaagtatacgaaatgcagggacacatgtacgaaaacatacttatccccatcacagacggaaaacgtatgtacaacatctcctgcaacctgaagaaagcttacgagacagaatgtaaggaggtggtgaagtcattcgagaaatccatcttgctgcatgttatcgacgaagcatggaaagaaaacctgcgcgagctggacgagctgaaacactccgtgcagaatgcaagttacgagcagaaagacccgctactgatttacaagctggaatctgtgaacttgtttgatgcaatggtcaacaaaatcaataaccagaccatctctatcctgatgcgtggacaaatcccggtacaagaggctccggctgaagcccctgaggctccccaggctccccgccaagtagaggtgcgccaggctgctccggaacaacgccaggatatgagcaagtatcgcgaacagaaggttgatttgaatgacccgaaccagcaggccgctgcggcacaagatacacgtgaacaaccaagacgcgaacctatccgtgccgagaagaccgtaggacgcaatgatccttgtccttgcggaagcggtaagaaatacaaaaactgccacggaaggaatgcataaatcaaagctataaaatgataaagcgatagggtgataagatgataccgtcaggtatcttttatcaccctatcactttttctcctgccacattatcacattttttattcgttccagcttttgaatattcagctaaaagagtacttttgctccaaagaacaaaaccaaagactatgaccaaatatcactattgtctgttattgatgggttctctgctgttaggcagctgccagagtgtagaacaactgtccattgattacatgcttccggcagaagtcagtttcccggcaacattgaaacgtgtggctgttgtcaacaacatgccaaacgtaccggacaacaaactcatcatcagtgaggaagaacagaaaaaaagtgagaatgaggtggcacgcctcaccaactactacaatggagacgccgcaataacaaccgaatcccttgcagaggcccttgccaacgaaaactactttgaagaggttgtgatatgcgactctgctctccggagtaaagacatcaatccccgcgaaagcacattatcgagggatgaagtactggaacttacacagaatttggacgtagatttcctgatagccctggaaaacatacaaatgcgttccaatcgcaagataagttatatgcccgactggggtgtgttcctcggcacagtggatgtaaaggtatatcctaccgtcagaatatatttacctaaccgcaaaggtcctatggtaaccgtcaacagcaatgacagtattttctgggaagaggcaggaaatggtgaagcgtcagtacgttcccgcctcatcagcgaagaagacatggtgaagcaagcatctgaatttgcaggaacagttccggtaagacatctactcccctattggaaaaccggtaaccgctatctcttcagtggtggttctgtaaatatgcgtgatgcagccgtatatgccaaagaagaaaattggagtaaagcagtagaactctggaagcagacctacgaaacaaaaaaaggaaaacagaaaatgtatgcagcctataacaccgctttgggctacgaaatgcaagacagcatagatactgccttggaatgggcattaaaagcgcaaacccttgcccgtgagaaaagcaagacagacaaaaaagagacaggcgaaatacatgatggaaccatctcctattacatctttatcagcatgtatgtagacgaattggagaaacgaaaagagggaatggcacgcctgaacatgcaaatgaacagatttgatgatgatttttagtcaaatgatgcagagataaccgttttttttatacctttgaacaaccattaagaaaagaaagttattatgaagctcagtcaatcgtcattagcactcttagaggacactcttaaaaaagcaatcggcaaatacacctgcggttgcgaacagactatcgttacagacattcatctgcaaccgaatcagaattcgggcgaactgtctatctttgatgatgaagacaaggagctagccaataccaccattgaagaatggatgacatacgagggagatgatttctacgaaaatgtagagcgtatcttgtcctcactgctctgcaacatgaaaaatgaaggaaagttcgacaagctgactattctgaaaccattctcttttgtactggtggatgatgatagagaaacaatagcagaactgttgctgatggatgatgatactctattggtcaatgaagagctactgaaaggattggatgaggaactggattcttttctgaaagagctgctggaaaaataatattccaaacaatcagcctataaggaaaagagaccttcttataataaattagcccctgcgatataaaacaaccgcaggggctaattctttttttacctacaccaatacctaacgtatcttaattccatagaaagaacttgaggtggtaacaaaaagtatatccttctgccttccaccaattgccaaggaaatcgggcgttcttctatctgaatacgtctctgctctttaccatatttgtcatagacaaatatttcaccatcagcaacatagacattcccatcagcatcggtcacattactgtattggccataaggacatattattccttgttctgtcaaacggccatccacaccaacggaaagttgtactgtcgttttattcatctcatttacaatataaaccggttctgactgaccgggcactgtaacagtcaaagcacaagaacgtcccaaatcataggtatccggaataattgtcacgccatccggagcgacaaaactatactcaggcatactggcaaccaccttgtcaaagtcacctctccagcgactggaagggtgaatgaccttctgtatattcttcataccggctgtaacaacacgtggcataggcttcatcgtagcatccacgctatccggattaaaagaatacccccaagcactccagccactgttaccccaaccactgtacatcggattatcatccggcaagcgcactaccgtttcctgcttgccgttcaccagataacccggctgagggtcatagcggaaaataaccagcagattgtcttgcgtatcagtggccaatgtaaaaggcttccagggataatcagctatcaaagtaatctgctccgtgtctgccgaccatctatagattttcttcagacggttttcacagaagtagatatttcctttactgtcggtagtagctccggaggccagttcaaaaccggtagccagcttcacaggcttgtccatgaccgtgcaggaagggcgaaggctcttctcgctacccgaaacagtgagacgggcaaagtcccacgaataaacgggcaacttcttattcatatcatatataggaaactctatgactggcaatatctgcgtataattgtgcatattacggaaagtgatattcttgcaatcccatatgcggaaacctatcctctttggcataaaggcacggataacgcgatacatccacacatttaccatttcgatattttgacaattggacatttctgccatataacaatcaggcccttcacgaccttcttcctcaaactggaaagcataaattttccagttggccacattatggaaacgggcttcagtacggacatgatgctccaaagacatggcataaatacgtcccggagtcttcgtttcgctaatataaagcccactggcagcatacgtactggctgtccaaacatccttaattgtcccaccgccattgtttgtaatccacaaactccaatactggttgtcccaagccatatccttaccggtctccatgaccggagaagacggggaactaattcgacgctcgcccctgcggtaagacgactgtccggaagcattcggagccggtttgcgcaaggtgccgtgcccgcctacaaacttcacatcattcaagtacgaacactcacccgccatccatttacagccgacagcacggtaattatacgcaccagtattaatacctataccattcagtacgtcgtcgccgccttcggaagattcaaccaaaggcacaggcacgccgaaaccactgaatgcaggctcgctttccttcaacagaaattgagtcccaaaaggatgcagcccaatcagcttagtaccgggagacagcttcaacgttctcgtcagacgataccacccctggggcacatagatgtttttatgcaaagagacagctttttcaaaaacttccgtatcatcagtctcgccatcaccttttgcccctaagtcgcggatattgacccatgtctccattgccggaagaaccggaaggtccttgccaagtggaaccggcagttttgccaccggctctatttcacatatttccctgaaagaagaagcatcattcaaatcctgatacaccagaccgtaagtaaactccttgactctgtacatttttgcttttccggcaactttctttccactttgagcatagtccaccagtacgggaacattcctgcaatccacattcaccagattcaattgcgaaaaagtatttccctctacgcttaccctgacaccggcttccgaaatattctcccacaacgaattctccacatgaaggcggtctgccagattctctgccatttcaaaggcaacgggcgtattcttcacatgcatattgacgatggcaaaccccacctcttttgaatagacagccgcttttctctgcccctcaaagtaagtatcgaccatcatcataggccatcccggagaagtcctggaagaaattatcccatattcaccgccatagaacctgacgtcttccagttcattgcccacatcatacatgccggcttttcccgaaccaatccgaatgtcgcaatgattgataaatccatgctgggcaaaatgcgcacgaatggcgacggcttgaggattacctttgtctatacgaaaatccacattggacaccgcactatagaaagtacctgcaccggcatccgaaggcttcctgccctcttgtgccagccctcccgtaaaccatatcatataattttgagtagtctggaaaccgggtgtatcggctcccaaataaatcaccggccgtttcttcccataaccaatcagccgaatggatgagggaatttgaatcgtcttgctaatgcgataatttccttccggcagaaacagtatcccaaaattcttttcgcgcttcacctgattgattgcctcttgaagcgcatcggtcacgtcggactttccatcagccttgaagccgtaattctccggggtaaagtagaatgcttccggatcgtccggtctttgcgtataggcggaaccaccccctaccgcccacccggacgacatattacagataatccaacagactatcagcaggtatctcattatttgataatttctcattacacagattgttttaatatggattttccttatttaatacgtacaccaaagaacttggaacggcctgtgacaaacaatgtattgccatccttaccgccaaactgtaatgtggacggacgttcgggaacacgaatcatccctttcttcttgccatccttatcaaatacatatatttctccgtcagccacatacaagttcccttccttatctacagcagaaccaaattcgccctgctccacaaaatagctcaagttggagagcgtgccgtcattggccacatccatcttcaccattctgcggtcatattcatcagaggtatagaaaggctttcccggataggcttccagcaaggaagaactacgtgacaagtcgaaataatgaggaatgatagtttttccatccggtgccaggaagcacatttcaggaacatagaccgacaccgcattgaaatcgtggaagtctctccaacggttagaaggataaagagccttatacacgttcttcacttgacccatcggaacacgcggcaacagtttgatggtctcttccggattttccgggtcaatggagtagactctcattgtatatgcggaattaccatatccgctgaaagaagtaccttttgtatcaggcattaccggcatttcctccggtttaccattaatcagatatcccggctgcgcatcatatctgaacaataccaatagattatcttctgaatcaaaagccaggttggagggtttccacgggaaatctgccagcagcgacaagctgtttgtctctaccgaccatttaaagatacgacgcatccgatggtcgcagaagtaaatgttacctttactgtcgcgcgcaatgccttcggcaaattccaaatcggaagccaattggttcaccttacctatttcattgcctaacggttgctgatgaggttcttttccggttacaatcaagcgagaaagttcccacgggcggatgtcaatgtctttgttgacatcgaacactgcaatgttattcgtatatttaatctgagaatagttatgcaggttcagaaatgcgatgttctcgcaattgcggatacgtacagaactgtgatacggttcattgacacggataacgcggaacatatacaagtttgcaaaggtcacatctttgcagtcgtccatctctatcggttggcaatcggtactttcgcggctctcttcctcggtttgcatgcaatacaccttccagttggacaccttgttgaaacgtacttcatttcttacatgatgctcgatggacatggcatagatacgccccggagtagaagtattgttggcatagaaaccattggtggcatatgtgcttgctgtccagatgtctttaaaggtgccaccaccgttgttggtcacccacagactccaatactggttgtcccaagcaaggtccatgcccgaagccgctaccggattatcgggagaactgatacgagccggtctgttccaccggccacgtggttcctcaacacccggtttaggtttccataaaccgccatgcccgcctacaaacttcacgtcattcatataagaatctgcatttgccatccacttcacacctacagcacgatagttataaccgccggtattgataccaatgcccaccagcatatttgcaccgccttccgaagattccaccatcgctttcggaccgccaaaaccactgaatgcagcagtactttcgtctagccggaactgagtgccaaaaggatgcaggcctatcaacttggtatcgggcttcatcttcaaagtttcggtaatgcgataccagccctggggtacatagatattatcatacttgtcaatagcctcctggatggccttcgtatcatccgtttccccatctccctttgcaccgagttcgcgcagatttacccatgttgccattgcaggcagtgtagggatgtccatcagttgggcaaccggcatcttctgtatcggttcaatatcaaccaacgtttcatattccggcatatccaccatgttatccatctgcaagccgtggtcgtatgactttaccttatagattttatgagcaacatgggtggccgtattgctacgggtatatttcgccaaggtcggtacattcttacaatatacattgcggaaggttatctgattgttgctgttgttctcgttggtaatcaccactgccggaccacttacattttcaaaatagctgttttccaaaaataacttgtcgcaataattagggtcaatatcaaatacagccggaacattcttggcatacagattcaccattgccaaaccggactcctgacaacgaagagcagctacacgttgtccctcaaaataagagtcgaccatcattaccggccatccgggagaagcttttgtcgtataaatgccataatctcccccgtaaaaagcaacgttttccatttcattaccgacatcgaacagccctgccttacctttaccaatatatattgtgacataactgataaaactatgctgcgcatagtgtgtacgcaatgctaccgcatggggattaccatcttcaatacgaagattgatattggacattgcactataaaaagtaccggcatttgcatcacgagggacttgccctttttctaccaaactactggtaaaccaaaacatataattagcctttcctttatctatcgagacttcttcttgaaacccaggagaatttttagcgagaataaattccggacgtttttttccataaccaatcaagcgaatagaacctggaacataaattgtcttactaattttatactttccctcaggaataaaaagtataccaaagttcttttccttcttaacctgatttatagcagcttgtaaggcatctgatacatccatctttccatcagcctttatctgataattttcaggggtaaaataaaaagcctcaggatcattaggctttaacgtgtagatagagttttgctgaacagcataaagttgcatacatattaaccctataaatatcaaaaatataattctgatttttttcatggtttcattttatatatgattaaaaaagcgttcaaccataaagcagaacgctttttctgctattttttataattttatgactactaatggtgcatagttatgccgtacagtccctacaccagatacatcagctaaagcaccaattcgaaaataatagttcttactatacttgaaaacatttgtatttttctccaagtcaattgttaaagtatattttttagaggaaacaaccgtctcacttggtgaaattgtaatcttatcactaccaccattcaaagaatattttacattgtttccaacccatttatctgagaatgcaaacaactgaacttctttgactttcacttccggcttaccagtttcaagaaaaaaagttgcagttataacattaccattttttacaatatcaggattctttatgcgaagataaggagttactttaaaatcataaaaattatcaccatcatttattacaaaatcttttatctcaaaaggataaaagttacaattctcaaatctaacgtcatatgtagcagcaaataccatattattacgatattcacctgtattcataatagaccaatattgatcggccggattagtaaatccatgctcccttactatgatagaagaaccattctcaatatcagtaccaaccaattctccagtcacctcatcaataatagaaccatgaattgaagcatctggcccatcataattatcaatctcgcatgaaactaatgcaaaaaaacagcatgaaattaataataatatctttttcataattatttaaatgttttgtgttaataaccaggattctgaactaatccatttgtattgatacccggaatccctctataataacttgtagattggaatgtataaccaccttttgattcatccgtaaagtaatttgccctcacaaaaacatattttggagttggttcacgcaggtcaagcataggaatcaaaaccttacgaattctatttccactaaactccgtatgaaactctcttcgacgcatcatatcccaaaaacgttttccctcaaaagctaattctacacgacgttccttcaaaacattctccaatgttaaaggtatattatcaatatgccctgctctatgacgcaatgcatttatatattgcttagctaatgtttgatctccatatccactactattttctaccacagcctctgcataatttaagtatatttctgccaaacgcatatcaatataagaagtagtagaagaattgtctaaacctgatatattctcaccttcaggcatatatttacgaacagaaaaacctgttgcagtccagttggcatcctcagaactacctacatttagaaaacctgagaacaatgtctgcccagcagctcctaaaccataatatgtctttccatcctttccgacagccgactcgttagaataagcaatataattattatctacttctataagaccaccttgtataataatccgtgtaccaccataagaagagccaggaacaataatactagccaacaaacgtgcgtctttatctgcaaaaggtgtatataaatcatcatatttcttgaaaggtatagacattaactgtgttttattggcctctacattattaaaataagtaattacataatcttcattaccatcagtacgagtcacaatatttgcgctttttcctataccgtcatcagtataatcttcaaataaatcaactatatctaaagtcggattaaaacgcccatactttaatgctccccccgtatttacttgagaaaggatataaaattgtgcataactatggccttgattagagttggttgtcccatccaaataagctttactgaaaatcacttcttcattcttatcattacggaacaactgctgaaaatttgtaacagcctcttcactcgatatagggtttggtttataaatagattttcctgactgggcaataattatctcagaagcagaaatacattctttataaaatgcgtccgcatccgatatactcattccccctatcaatttctgtgttacagcttcaccagctaatggagccttatcccaatattttgctacagaagccgcatgaagagccacccttgatttcaatgcataagcagcccatttagaagcacgataaaccccatccgtagaagaaacaacttctggaagattctctacagcaagatcacattccgtcaatacaaacttccacgtatccaattccgtactacgaggaatagcaagagaagagggattaccagggacatattcatcatcttgcacatgctccactaaaggtacaccaccatatctttttaccaaaccataataaatatatgcacgtacaaaatgagcctcactaagtaaacgatttgcactatcttctgaaatagttcctttttctcgagctttccttacattttccataaagatattcacctgacgaatatcactataaggccaataatcaaatccttccggacctataccttgcgcaccgtcactacgagtagcctcatctgtaaagaaagcaatatttgacgtcgcattcactccgtcatatccacgttgattaaatccagcattaggacgataagtaaaatcttcgataggcattaaagtatatatatttgccaacaaagcttttaatcctccttctgtttctgtcaattgctcacctgaaactttatctaacggttccaattctaaaaaagcattgcaacccaaaagtcctattagggtacaaaaagacaatactgataaaaatatttttttcataatatatttacattaaaagtttatattcaatccaaagttatatgatctcatcaacggatatgcaagattcgctccccaatccctttcctcacgttctgggtctgcatttctcaacatacgattacataaagtgaataaattagaaccattaacaaaaaaacgggcactattaatgagggcactgaaaaagtcccccatatagtagcgtcctaaaaaaatcggcacatattcaggcaaaagcttgagtatgtgccgatttttttgtaactttatggtagtaatcagacagatatgctaccactacaacagactatacagttcagtaattattcggatctatacgatttgattattcctcgtaacaacctattgcgtcagataaatgatttgatagacttttcttttattaaaaaagaactcgttgacaagtattgtcaagacaatggaaggatggccgaatgtcccatccggatgttcaaatatcttctgttgaaaacaatctatgacatatccgatgtcgatgttgtggaacgatcaagatatgatatgtctttcaaatactttcttgggatgagtccggaggaaacagatttgattaatccgagctcattatgcaagtttcgcaagttgcgtctaaaagataaagatctactggatttgctgattggcaagactgttggcatagctatagaaaagggcataataaagtctcgcacgattatagttgatgccacccataccggctcacgcagcaatccttggtcacccttggagagtctaagattgcgctcgaagcaattgcgcaaaagcatatatgatgccgacgagaccgaaaagagcaatctgccttcgaagaacacggatgacaacattgagcatgagcttgactatacaaaggcattgcttgatgtagttagctcaaatccctcattggcagagatacccaaggtcaaagagcggctgaatatgctcaaggaggtacttgccgatattgaagaccattatatgacatcaaaagatgaagatgcacgggtgggtcacaagagcgaggatgactcgtttttcggctacaagacacatattgccatgagcgatgagcgtataatcactgccgccacagtgacttcgggagagaagggtgatggcccacaacttgaagagctggtaaaccagagccgtgccaacggaatgacggtggaaacagtcgttggagacacagcttattcaggtaaagacaacatcatattatcgaacaatgaagagaatggttttgagctagttgcaagattaaatccagccataagcaatggattccgtaaggatgaggataaatttgatttcaataaagacgctggcatgtttgtttgcccggctggccatatggcaattaggcgcgctgtacaaggaaagaaaggacagggaacgaatcagtcaatggtctatttctttgatgtagataaatgcaagttatgttcaaggcgagagggatgctacaaagaaggcgcaaaatctaaaacatattctgttcaaataaaatcatcagagcatcagcagcatgaggcgtttgagaaatcggaagagttcaggagtaaagcaaaagtgagatataagatagaggccaagaactccgaattaaaaaatgtattagggtatgaccgagcatggtcatacggaatagaatgtatgcgtatgcaaggggctatggttatctttgtagcaaatatcaagagaatcctcaaactcagatgaggggagagccttttcgttctctaaaaagcccttaattggccgtttttaagctttacagggcaagtaaccgctaaattcttagattcaaaagtagaaaaataagttcgccaaatccaattatatggacttggcgaacctttcattttattgcctttagagagcctttttcagtgccctcctattaatacctatttttttcataagtgacttaggcaaagtataacctatttccaaactctttaaacgaagataagttgctaatggattccagaaggaaatgccattattccactgattaccattatcagtagtatttgagaaatcggagcgcaatgcaggataatatcctgcaacccactgtgtagaaggattatatggatcatccgtaacattcactgtatgccaacgatccataaacttctctaacaaataagttttattagtttttgcaccatatccccatacatcatcattagcatagccaatagaataaccagaagcaccttggaaaagcatattcaaatcaaaatttttataagaagcagctaacgtcaaaccatactgaatcggaggattagctccagtagcccaaaattcgggaacacgatcattccaatcaatcatgccattaccattcaaatccaataatctgaaactcccaggaagcattttggaattacccaaattgccacccaataaaggggctgtttcatattgttccagagaggtatactgtccatcatatttatataaccacattacattctgattacgattctcagaaccattctgccatctatccatagagcttgtatattcaccatgttctacatgcaaattcttctcacgtgcataagtgaaattggcagataccgagtattcaaaatctttacccaccttacctctatgtcctaacgaaatttcaaatcctctattttggttagaattaaggttttcttgtggaaaactcgctccaaatgtattaggaaccgattgtacccggtcagctaaaataccttcattcttacggttaaaccattcaatagacccacttagttttccattccacaaatcaaaatccaatcccacattagatattgttgaagtaacccatgaaaggttatccgtaactacaccaggtgccaccatacccgtaacctgactattaccatcaaacacatatcctaaagaacctgctgtataagcagatatgtactgaaatgcatcaccggcatcataaccactcttaccaaatgaagcccttaacttcaagttggtaataaatggtaacttctccctaataaaactttcctcagaaatacgccaacctacgctgaaagaagggaaaaaagcccacctatggcgcggtgcataacgataagaaccgtcataacgtgccacagcttctaccaaatactttccggcataatcataattcacgcgcatcaaatatgcagccaaccgccccaaacgacgataaccagaattagttgctgttccagaactagcttgatctaatatatcatttgtaaatagttccgaatattgacgggctccacttaaattatcacgacgagtgccactcagttcagcaacagcagttatatttaaattatgcaaattaaaagaacgcatataattggcttgtgcacgtccataaattttttgataaagattcattgtattcgaatatttatctgtaccatactttcccgaaggttcatcagtataataatcaaatagttgatatgatttttgcagctcagaattgttacgattattcccatcaaaagatcctaatgcacttaaagtcaatccttgtacaaacggaagtttccagcttaattcgacatcagcagaataggttaatcctctatttctgcggtaaccgtcaaggtctggatcaactaatgcaaatggattctttccctccggaccaatatttgataaatgttctggattattcattgtatgggttccgataccacgatcattgaccattaaagtcttaaatgtccactgaaagtcttcacgaggtctctgggtttcatcccaacgtcccgatacatttacattcaaatttaatcccttagttatttcagcagtcaaattgcttctcagattatatctgtgataatactgaataccacttttcaatagaccattatcgccagtatatccgaagctaacataatatttcactcgttcagatccacctcttactgatatattatgtgactgctggaaagctaacttattcataaacatatcaatccaatcatgatctgtataaccgggagcccctatcctatacttctccaaaatatcatcagtatatgcaactgcagcctgatcattacgtgctctctcattggccatcatacgatatgtataggcatcaactgtctcttccatagctgtgggatttttcacaccaaacaaggcagaataggacacacgcgttttttcggcaactcctttcttcgtcgtgacaataatcacaccattggcagcattcataccataaatggcagcagaagcatcctttaatatagaaatactttcaatatcttccgaactcaattgcgccagctcttctgtaccatcccgtgtaataccatcaataacaacaagtggcgtgccatatccacgaatactgaccatattatcaaaagtaccaggctcaccagttcgttgacgaatcaataaccccggcatcttaccttgaatattactaatcaaattttccgttttagtagttgcaatttcatcagctttaattgctgtgacagcaccagtcaacgattcttttttttggataccataacctactaccacaacttcatccaaaatctcagtatcctctactagtactatattgaaagatgtcttaccagaaatactgatattttgtgtcttatatccaacataactcacaacaagtgttgcaccagaagccacattatttaaaataaagttaccatctatatcagtaataaccccattagtggttccttgtacgagaatacttgctccaataatcggctcacctgctgtatcactaacagaacctttaatcgttgatacttgtcgaacagctgataccccatcagtctcagtagccttatcataaagaactatattacgatctaatactttataagctatattcgttcccttaaatatctcatctaaaactttaaatatagacttattagcagcttttattgttactcggcgtttaacatcaatctgtttattattataaaaaaaacaaattctgtacctttttctaactctgtcaggatttcgtcaacagttttattattaagagcaatattcaacatcgttttttgggcataaccatcattggcaaatgccatgctcactaaacaaaataacataaagaatgcacatttcatagcaagaggaatttttttcatgcatctcatcaggacactttttgccctaaatgattggatacaaacattgtttttcataattttgtattgatttctagtgaaaaaataaagttgctttatctgtcgccaaacagatatttaaaagttactgtgtttcatgcaggaaaatgcgccaacattttcctgcatgtttttctaaacggacttgtgtttcatcatactactttttaaagggttaataaacttctattacctgtctctcggcattcacatcaccatcttcaacaaacttgaaatgaatattcgaggatattcggaagtggtccaatattcgctccaaacgttgtttggtaaatgtagccgtaaaggaattctgcttcaatgaagcctttttcagaatgaattccacattataccttttgctcaaactcttcaatatatcttcaaacggagtgttcctgaaaatcaagcgtccgtccttccaacatgtttccacgtctacattgacttctttcacaacgaccttttcccgcactatatcataaataaccttttgccccggtatcatcattacattattcctcctgccattattcacataggagaaactgactttacccgaaaccaaagtggtctgtaccgtcctgctccctttgtaagcctctacgttgaactccgttccatgtaccactatcttggaattgttcagcgtgccgacaatgaacttcttttcatcttttgcgacagaaaagaatgcttcacccaccaacttcacttcccttttatcatcggcaaatcgggaaggatagcgcaacgacgacgacgagttcagaacgacttccgttccatccggcaattcgacagaagtagtcattcccggatttgtcctgacttccatcatatgtatctcttctttatccttgtcccaataaaggatagaccacgataccatcaaagggatgaataaaatggcggccgcccgttgcatccctctaaataatacctgatacctattgacctttttctgtttcatcttacgatgtacatcctccaaggccttctttacatccagcctggatgaaatctgcgccatgtccgccgccagaccgagtgtctgaacctggcgggctgtcctgcggttctcttccgatgcttccagccactcctctaccagagcagtttcatcctccattgtctctccttcataatacctgagaagcaggttctccattccctctctttttaccataatttttattgctagctttaatctaaagacaaacgggtgaaaaaaactcctaaacaaaaagctaaaaatattttatatacttagagtacaataggaaaaaaagctatttttgcccaacaataataaacacccaccatgaaaaatacaccatcagaagatacatctttattatttgccatacaaagaggagacagaaatgcttttgatatgttatttcagaaatactactccgtactctgtacttattgttatcgttttgtccggttggaagatgcagaagagattgttcaggacgtcatgctatggctttgggaaaaccgagaaagacccgttatcgaatattcgctcaagcaatatctgttcaaggctgtctaccatcgttgcatgacccggattgcccaaaatgaagtgaagcaacgggcagacaccgcttactatgaacgaatgttcgccatgctgcaggaggtggatatctatcaaatcaacgaattaagcaagcatatacaaagggccatcaacgaactgccgcctacttatagggaagctttcatcatgcatcgtttccagaatctgagttacaaggaagctgccgaactactcaacgtttcccccaaaacggtagactaccgcattcagcaggctttgaagatattaagggtcaagctgaaagattatctgccactgatattgatgcacctgctcacctcgcattaagaccatacacaagcagaacgtcccctataccgtgccggctacacaccgggacttagccctaaagagtataggactgagaggtcaaaacatccgaatgttttaccccaatacatggggatgttttcacccaaaacacccggatgtattacccaaaaacatccgggtgttttaatggaaagaatgcggatgttatgacctctcagtatacgggtcagaccggttcagtcctgatgggagaggcactaagtccctatacatcccgtattcattaattattctaaaaaaagttagggaaaactccgggccaccggtcatataagcaagaagtaaccctattattatcataacctcaaaatgcacgcaatgagaaaactgattatcctattgtcggcgctggtgtacgtcatccatgcacaagcgcaattttcagtgacagcccatcaggaaggatggaacaatatccctccacaagtacaaaaaccgggattttcctttcagcaatccgtacttgccaatatggacggggacgatgcccttgaagaagtaatgcttttcggacgtgacaacgggcactaccccactttcgaccttttcaaggcctactatgcaatcgtagacaactataccaaagaaatacaatacatttccgacgagatttatgtcaccgacaagtacaatctccttgtagaagaccgcaacaaggacggcatctccgagctctacatatcctacttcaaagatggaaagttcagcgtagacgaacaaggttacaatctgcgcaccacacgctgctacgaccgtatagaatggaaccctactggcaaaaactttaaatcttccggaaaatgaaaacaagactgacacttatcctggtactccttatttatataggagctgcctcgcacacacacgcacagcaaaagaaagtaatcaaaaccatgatgatagccgggcaggacggcagccattactggcaaggcgcctgcgaagccatgaagcagatattggaaaacagcggaatgttcaaagtggacttcgcctttacacccgactttggtggagacatcgctaccttcaaacccgatttccaccaatatgatttaatcgtcatcaactacggcggagctacatggacagagcccgtacgcaagaatttcgagaaatacgttgccgatggaggcggtgtggtagtgatacattcttccgtcgtcccaatggccgactggaaagaatacaacgagataataggcatgggggcatgggacggacgaaacgaaaaggacggcccgtatctgtactggaaagacggacaatacgtctacgactactctccggggtatgccggctaccacggcttgcagcacgaaaccgtcatagaacaccgcgccccccatcatcctatcctgcaaggattgcctcctcaatggaaacacttcaaggacgagatatatacccgcctacgcggtccggtaagaaacatggaaatattggcaaccgcctacgaacgcggacggcatgaaccgttgatgtggacagtaagctacgggaaagggcgcatattcgtcgacctcctggggcactgcggcaacgatccgaacatgacttactccatgcgctgcaccggtttccaggtgactttactccggggatgcgaatgggctgccaccggcgccgtcacccaagaagttcccgcagatttcccactgaaggatacttatacattacgtccggagttcaaggctccttttcatgcttaccctgaaaccaaacactgaataccatgaaatacatcatccgaacactgctgctggcatgctgctgcatgcaggcacaagcacaagctccgtggaaacccgatacggaactggagaaacaattacagcaaagcaatcatgtgcaccgcataatgaaagctaatcccgcacacgccggactgacgcggtgggaaaagaaagaggtattgaaaagcagggtactccctctggccgaagatttcggcgctctgcgccataccggacccggaaccatacatgtagaccgtaaagtcactgtctcaggcaaaggaagtgtccgtctggacactcctgcctccctgggcaagaagaatccaacaaaccggaattacgccaccccgaagattatccgtcccctcgaccgggaagacttgcgggaatacaaccgcttttccgtttgggtatatgtggatgcaccgggcgtttatctgacctttgccggattcaccctatacaatgaaggggagaaaatcatgccgactcccggacgctttgaaggacaacacttcgagactgtctatcccaacaaatggcagcacatcatatgggaaataccggacctataccgtgattgtgtcacaggcttttcggtaaacatcatgctggcaggtgctcctgcaggagccagcgaacacatgagcctatacatagacgacatgcgcatcgaaaaggtagaagcggaaaacagccggggattcgacctgcgaaaagatgcaatggcctactgccacagcggatacaagccgggagcacgcaagcaggctttggtgcagcacgtaccggaaaggactttcagcctacacgatgccgccacgggacaaaccgtttatcaaggtaaggccagtcctctgaatcaagacaagaagcaggacaaaggatttcttgtgctggacttcagcagtttcaatacgcccggacaatacttcctctccatcggtgatgtacaatcaaagcctttccccatcggaaatgatgcctacctgtctaccgcctggcacacgctgaacttcttcttttccgaacgttgcggtttcgaccagcccggcattcatcaggaatgccatcaggatgtattcgcctatcatcccgacggacggagcatgagtattgccggaggatggcacgatgcagccgacctgactcaaggaacgggaaatacagccgaatcgtgcatcgccctcctcgaaatggccggtgccgtacaaggcaaagacagtatcttctacgaacgcctgctggaagaggcacgctggggagtgaactggattctgcgtacccgcttcggtgacggctaccgactgggcggactgattatcggcatttggacaaagaatatccgtggtgacaaagacgacatgcagacagaagcacgaaatacacctacggacaatctgaaagccgcttccagttgcgcactcgccgcccctcattttgaaaagaaagacccggtatttgcacggtggtgccggaacagtgccattgaggacttccaattcgccatcgacctgctggatacacaaaggacggaacagaacgaaaccgaactttatgcccttgccaccgtcacagccatgcgtttgtaccgccttacacaagatgtttactatctggactgggcaacccggctggcacgtaccgtcatggcaggccaacaattggaaaagcgtaccgactggaaaatccccctgcgaggtttcttctatgaatcttcccggaaaaagcgtattctggcctattatcaccaaagccaagagcacttgatggccgaaggactctcgatgctactgacagatgcccccacccatccggacgccccgttgtggcaggcatcttgtgaagcctatgcagactatctacgcggggtttcacaactgattgagccgtatggcatactgccaagcgccgtatacgaggtggataataccgattataagaatctgtaccatgaaggcgagcaggtagggcttcccagtctggaagaatacaatgcacaagtgcgcaacggtatccctctctcaaagaacttctacctgcgccgtttccccgttgcctaccagttcaggggattccacgctgttgtcatgggtaaagccaaagcagcctttattcttgcacgcctattcaatgataaagcgttaagggatattgcaacccgccaggtagaatacatattaggctacaacccgtttgccatgagtaccgtttatggagacggatatgactacccgccactttacggagcctatgccggagatgtggtgggagctgtacccgtaggaatcgaaacattcgaaaatgaggacgaaccctacttcccgatgcaaaataactgcacttacaaggaaatctggacacacaccaccgcacgcctaatgtggtgcgtagcagaactattcaaataaacagttcattataccgctaaaaaaagctccggagttgaaggttccggagctttttctctgtttttatgtgacggacagttatgcctttttcaatgctgcaatactttccttgagagatttgatgatactttcagcatctgcctgcttcttgcgttccatctcaagaacggcggcaggagcattattcacaaacttctcgttacccagtttcttcagcacaccctgcaagaatccttccttatgcttcagttcggcctccatacgggctatctcggcttccacgtcaatcatgttacccaaaggtacggcatattccgtagtagctaccatgaaggaagcagcaccgtcggccttgttctccaccacattgatggacgaaaggttacacattttcgtaacaaccgcgttgaacgccacaaccggattctcaccgataacctgcaactcaagtacctctttttgggcgatgttcttctgcaaacggatggaacggatattgctgataacctctttcaccacttcaaactcccggatgatatcctcatctaccaatgccgacattgacaacgggcttaccatcaagctctcaccgtctgtacggtcgcaaagatgctgccacaactcctctgtaataaatggcatgaacggatggagcagatgcaacaagttatcaaagaaaccgatagttgcttcatacactttccggttaatgggctggccgtatgccggtttaatcatttccagataccaggaagagaattcgtcccagaacagtttgtaaacagccatcagcgcttcactcaaacggtacttgctaaacaaatcagccacttcggcagctacttcattctgcttggcctcaaaccagcgtactgccagttctgaagcttccggtaccggaacttccacactgacttcccaacctttaatcagacggaaagcgttccatatcttattattgaagttacgtccttgctcacacaatgcatcgtcaaagaggatgtcgtttccggcaggagctgaaagcatcatgcccatacgtacaccgtcggcaccgtatttctcaatcaaatccagcgggtcgggagaattacccaacgacttggacatcttacgtcccagcttgtcacggacaatacccgtaaagtaaacgttcttgaacggcatcttgccttcgtactcatagcctgccataatcatacgggctacccagaagaagataatgtccggaccggtcaccaagtcgctggtaggataatagtagtttatctcctcgttacccggattgttgataccgtcaaacaaagagatgggccacaaccaggaggagaaccaagtatccaggcagtcctcatcctgacgaaggtcttccagtttaaggtctgcattacccgttttctcttttgccaatgccaaggcttcttcgggagtggcagccactacataaccaccttccggcaaaaaataagcaggaatgcgatgcccccaccacaactggcggctgatacaccagtccttgatattttccaaccagttcttgtacgtattcttatatttggcaggatagaacttcaactcatcattcatcaccggcggcaaagccatgtcggcaaagtgctgcatcttcaagaaccactgcatggaaagcttcggttcgatgggcacattggtacgttcggagaaacctaccttgttggtataggcttccactttttccagcaatccggcagcagccaggtccttctcaatctgctcgcgcacatcgaaacggtccatgccgatatacaagccggcagcttcactaagcgttccgttatcattgaagatgtcgatgctcggcaggttatacttttcacccagcatgtagtcgttcacatcgtgggcaggagttaccttcagacaaccggtaccgaactctatatctacgtaatcgtcctcgataaccggaataacacgtcctaccaacggaacgatcaccttcttacccttcaaccaagtattcttggggtcattcggattgatacacatggcagtatctcccatgatggtttcgggacgggtggtagcaaccactgcataacgtccttcggggtcaccttctaccatgtacttcagatagtacagcttgctgtgttcttccttgtagataacttcctcgtcactaagagcggtcagcgccttcgggtcccagttcaccatacggacaccacggtaaatcaaacctttgttatacaagtcgacaaaaaccttgagcacgctttcactacgtttctcatccattgtgaaagctgtacggtcccaatcgcaggaagcacccagcttgcgaagctgcttcaagatgatgccaccatgttcatccgtccattcccaagcgtgtttcaagaattcgtcgcgggtaaggtccgtcttcttgatgccttgtgcggcaagcttgttcaccaccttggcctcggtagcaatggaagcatggtcggttcccggcacccagcaggcattcttgccttccatgcgggcacgacgtaccagaatatcttgtatggtattattaagcatgtgtcccatgtgcaacacaccagtgacgttggggggcgggatgacgacggtgtaaggctcacgaccatcgggtttcgaactgaataatttgtggtccaaccaatactggtaccactttccctccacgtcagcgggattgtacttacttgctaattccatgtttttaaatctctataattaatttattgcgaataacggggacaaaattaatgaattaaaatttaaatatatatttttgtccctacaaaacagtatataaaatgagggggaagctaaaaatccggtatgtcatattaatcgtgttactgtctatcacatgggcaacacagctcataccaagtttgggagaagtatatgcgcagtctgtatatccggtaatctcccatattctgtcctccttttcaaaactcataccttttgccataggcgacttgtttattttcctcagcatcatcggactccttttcaatcccatcagggcacgctatattcagaaaaagaagtggaaacagattctgctgaacgagatggaatacttgctgtggatatacgtatggttctatctggcatggggactgaactactcacagaaagatttctacggcaggacaaacataccttatactgcctatactcccgaaatcttccggacatttgtatacaactatatcgacaaactgaacacttcttatacggacattacttctattgacgaaccattggtctgccgggaaagcgtatacggatacaaccaaatcagtgatacgctgggggtacaccgccctcctcactcttctccacgtgtaaaaaccatgcttttcaccccgttcatttccatggtcggtgttacgggaagcatgggacccttcttctgcgaatttacactgaacggtgatttgctcccgtcgcaatatcccgctacttatgcccacgagctggcccacctgctgggtatcaccagcgaggctgaagcaaacttttacgcttatcaggtctgtacccgttcgcaagtgaaagagattcgtttcagcgggtatttctccgtactctcacatgtgctgggtagcgcccgccaactgatgagcgaagaagaatacgcagagcttttcagccggatacgtcctgaaatcatagaactggcccaaaagaaccagcaatactggatggaaaaatacagtccgctcatcggggacattcaaaactggatttatgacttgtacctgaaaggaaacaagattcaaagcggacgcaagaactattcggaagtaataggcttgcttatctcatacgaagaatggaaaaactaaatttcaaaaccatgcatacaagaaaagaacagatggaagccttcggccgcttcctcgacatactcgacgaactgcgcgagaaatgtccctgggaccgcaagcagaccaatgaaagtctgcgccccaatactatcgaagagacttatgaactttgtgacgccttgatgcgcgatgataagaatgacatctgcaaagagttgggcgatgtgctgctgcatgtagctttctacgcaaaaataggctccgaaaccggtgatttcgatatgaaagacgtatgcgaccgtctttgtgagaaacttatcttccgccatccccatgtcttcggtgatgtaaaggccgaaaccgcaggtcaggtttctgaaaactgggaacagttgaagttaaaggaaaaagatggaaacaagacagtattgagcggtgtacccgccgccctaccctcactcattaaggcctatcgtatccaggacaaggcccgcaatgtaggatttgactgggaggaacgcgagcaagtgtgggataaggtaaaagaagaaatccaggaattccaggctgaagtcgcccatatggataaggagaaagctgaagccgaattcggcgatgtcatgttcagcctcatcaatgctgcccgcctctacaaaatcaatccggacaatgcactggaacggaccaaccagaagttcatcaaccgattcaactatgtagaagcacacagcatcaaggagggtaaaaatctccatgacatgacactggaagaaatggataagctatggaatgaagcgaaagcactggaaaaagaaagcaaacaagatgattcttctaaaggtcaggtttaactggctaaagtagaggtttagggaactaaagtagaggtttaacaaggctaaaacgaggtatctctcattaacaaaagaaggttgctcacaccatcgtggcaaccttccttatttgtaattcattcactactcattttttcccttgcggtcttcgctgggggccatctccctttttatgcatgcctttcagcagttcacgatggaaacgcatttcagctctttgcaccagataaatctttttacaagacaatatcttcttgaatttatcaaagtaggtcttgtccaaccggtcagaagcaatacgggcatcatacacaccttccataatttcctcatactgggcttcggttgttttttcatctttcccttgccggagcaatttccaagcctcgtcattcaactgctttttccggtcttgcaattcaaaatacaatgggaagaacttggctgcttcctcactcgtcagcccggctttctccgttataaacgctttttgtttggcacgaaactcttcgggtgacagatgctgatcacatccatcactagcccaaagcaggggcatcatgccacatatcataaccaataaaacaatcagtcttttcatttttcaataattgagtgttgttaccttattctgcatcagagtctgccaaataaacatacaatgaataatcatccagcatggaattctctacagccatattaatatattccatttctgtttccgtatcatcagcagccatacgctctacagatggagtatgctccgaagaagccacgcggataatcaatgccgcacctataaacatggcggtcatatacaaccaaggctttaccttctgccacattgtaggctctgtctgtacagcagtgagtttttctttttcgggaagccggttcattacctctgaagtaagattctcaaagtagccgtcaggaacgcggaaaggattttccgtccctatcttttttagtattttatcttcttctctcataagctttctcctttctgtttaattagacattgttttgtggcaaaggtttaatattcctcacccaaaaacttttctattttcttcacggcatggtgataagaagccttcaaggcacctacggaagtaccgaatatatcagacatctcttcgtatttcatttcctggtaatacttcaaattaaacaccatacgttgtttttccggcaaggcaagcaaggctttttgcaaagccatctctgctttatcaccggagaagtaaggatcactttcaagcttttgaagtgcatctgcctcgggatcatccaaagatactgtggaagcagcccgttgtttgttcagaaaagtgaggcattcattcaaggctatgcgatagagccaggtagagagtttagcctctgcccgaaaataatctatattggtccatgccttaatgaaagtattctgaagtaaatcattggcatcttcatgagagaggaccatacgacgaatctgccaatacagctgctcgctatattgggcaacaatcatctcaaatccccgcttttgtgtgctttcttcttgcagaagggccaacacttcgcgttcattataggaaggggtcataaatttctattcgcatttgttattttagactgccaaagataatgcaaaccgaaagcagaacaaaatgaacgagttcattttttatgtcgaggtgcagttatcttcgcacttgtgcaaagataaggaaagtttaattcataccgatacacaaagtgtttctttggcaagctgagtatccggaaaaatagcggatgcttcttgaagtaagatattttcatcttcatatcgtgccgaaaaatgtcctatcaacaacttcttcacctcagccctcctggctatttcagccgcttgtgcagcagttgtatgaaatgtttctttagcacgcggtgcatcctcattcgcaaatgtcgcttcatgaaaaagcaagtcaactccttttatctgctctacgatagaaggaagatagatggtatccgagcaataggcataactgcgggacggagcagaagggcgggtcaacaagttgttggaaacagtttttccctccggtgtcacgtaatcggccccattctttatacgattcaattcgtataccggcacttggtagaaatcgaccatttcacggataatatggttaggacgctgcttttctgcaaacaaaaagccacaacacggcatacgatgacgcaaaggaatggtagtaaccgtcaacgaacggtcttcataaatcagcatcggttctttcgtatcaaactcatggaaaaggaccttgtacgtcatctgtctattaaaaaagtccagcataggtgtcagcaatgtttccagcccttttggagaatggatatgcaactcggctgtacgtcctaaaaggtttagtgtagaaatcagtcccaataagccaaaacaatggtctccatgcaagtgagagataaagatatgattcaaacgtgaaaacttcagatgtgatttacggaactgcaactgtgccccttccccacaatcaatcataaacagcttgtcgcgcacgttcacaatttgagacgtagggaaatgacgtgttgtgggtaaagcggaaccacaaccaagaatatgtaactcaaacttttccattccaaaccttccgaactgatttctactccttgatttatagaagagcctttatctctgaaataccaaaggatatttcaaaagtttctctagatttattccctttatacagatagcccacccctttatcacacttcacacatacttccaagaacatgcgcaaggctggatcggaggaattcaaagagttcttcacatttgccttcatctgttctgcattttccttcaaagcagacatctgtactacagattcgtcaatcgtataatgatacagcaccttatccgactcgattgtcagtttattgagcaaagtggcttcatccacctgcatcgggcatgatacgttggtcatcttcacttgctcttccaatttcttcttatcactgctttcagcagctgaaccgccattcaatatatctttcaagtcttgagtagtcagataacactccacttcgttaccggatgtctttcctttatagatgaacttcataccggaatcagtaccgacaaccaaatccagcatctctttaatagccccttgtggattacccaacataacagtcacagcagacttcattgcatcgggattctttttcaaagcatctatatcgaggaaactttcattcataagcagcacatataccacatccgccccatcaaaagtaatgctggatatttcgccggaagctcccatatccatgggacattgtttgttggcagccgcgatagccagcttgagtttagacttctggccgcatgcggttagtaacatcagtgacaggcaagtgaacaacaccgtcttccctgcatttttgaacatgtttttcataataaatgaaaataaattattgaatatttctatgattacaagagcaaccaccctgcaaagataaacatttatggaaaaaccatccttaattccataaaattctattgacaaatcataaaaaagaagggcacttgtttacgcaagtacccttccttcatttatagaatggagtaattatttctttccagcttccatctgttccttcaaggcagccaaagcatcgatgtcacccagagtagtagatgcagcctggttttggatagcaggagcaacgtcttctctcttaccggttgacttcttagtagcagccttcttttcagctctttcttctgcctttgcagcatcttcaaagatacggctgtgagaaaggatgatacgcttagcgtccttattgaactcaattaccttgaattcaagcttctcatccaactgagcttgtgagccgtcttccttaacgaggtgcttcggagtagcgaaaccttctacaccataaggcagagcaactacagcacccttatccagcatttcgataatagtaccttcgtgtacagaacctactgtaaatacagtttcaaatacatcccaaggattttcttcgagttgcttgtggccaaggctcaagcgacggttttccttgtcgatttccaaaacttgtacgtcgatgtctgcaccaatctgagtgaattcagacggatgtttaaccttcttcgtccaagacaggtcagagatgtgaatcaagccgtcaacaccttcttcgatttcaacgaatacaccgaagttagtgaagttacgaacttttgcagtgtgcttgctgccgataggatacttctcttcgatagtttcccaaggatcagacttcagctgtttgatacccaaagacatcttacgctcttcacggtccaaagtcaggactactgcctcaacttcgtcacctaccttcatgaagtcctgtgcagaacgcaagtgctgtgaccaagacatttcagatacgtgaatcagaccttcaacacccggagcgatttcgatgaatgcaccgtagtcagccataactacaactttacccttcacgtggtcgccaactttcaggttagcatccaatgcatcccaaggatgtggagtgagttgcttcaagccgagagcgatacgcttcttctcatcatcaaagtcaaggataacaacgttgagtttctggtcgagttcaaccacttctttcggatcgctgacacggccccaagaaaggtctgtgatgtgaatcaaaccgtctacgccacccaggtcgataaatacaccataggaagtgatattcttaacggtaccttcgagaacttgtcctttttcgagtttaccgatgatttccttcttctgttgttccagttcggcttcgataagagccttgtgggaaacaaccacattcttgaattcctggttgatcttaacaaccttgaattccattgttttgccaacgaatacatcgtagtcgcggataggcttcacgtcgatttgagaacccggcaagaaagcttcgatgccgaatacgtctacaatcataccaccctttgtgcggcacttgatgtaacccttgataatttcttcgttttccaaagctgcgtttacgcgatcccaagaacgggtagcacgagctttacggtgagacaggacgagctgtcctttcttgtcttcctgattttcgatgtatacctcaacagtatcaccaaccttcagttcaggattgtaacggaattcactcatcggaatgataccgtctgatttataaccgatgttcacaactacttcacgcttgttcattgcgattacggttccatcaactacctcgcggtcgttaaccttgttcaacgtattgtcatacgccttttccagttcttcgtggcttgcactggctactgattcgccgttctcataagcatcccagttgaagtcttcaataggagctacattctttaaattttccattaataaataaattgtttaactcgttaattaagtgagactttatgttgactcattgtaaatcgggcgcaaagatagaagtattttcttgaactacaaaacaaaaagcattcaaaacagcagtggaataatcaattaaagaacaaaaaaaatgttacctttgcatcgtttcatttatacataatctcaataatttatcatgaaaaagataatcgcatgcatttccatcatttgctatacattattatgttatagccaaaatcagacaacggacaacaactaccgtacacaaaagaacatttcctatcttcatcccggcgaaaaggacagctataagctggagcgttgtaagctcgacctccattatcctactgataaaaaaggatttgccacccttatctggttccacggcggaggactggaagccggagaaaaacattttccgaaggagttcctggagcaaggctacgccgtgatagccgtaaactaccgactcagcccgcgtgcccaaaatcctgcctacacggaagatgccgcagaggccgttgcttggactttcgagaatatagaagaattcggaggagataaagataaaatatacatagccggtcattcagccggtggttatctctgtctgatgctcaatctggacaagagttacctggcaaagtggaatattgacgccaacagcctggcaggtgctttccccatcagcggacagactactacccactacaccatccgcaaagaacgcgggctgccttccgacactccgattatagataaatatgctccttccaataacgtaagaaaggacgcttcacccatgatacttatcactggcgacaaagagttggagatgctggcacgctatgaggaaaacgctcatttatatgccctcctcaaagcactgggacaaaaaaccaccctctatcagatggagggatttgaccacggtacggtggccgctcccgcatgtaccttgataaacagctatatgaagaaggcaagcaagaagtaaccactacccttgcctttcttttacgtatgccaatgccgctcctattgctgttctatattcagcatagggcggtatatgaaaatgtacatgatagatggcttccattttagaaaatacctcccggcactgaggcagttgggtaagattccctatcagaacgaaatccttgataggactattcaaagctgacagtacagcagctcctccaatggtttgaagcaccgtataaattataccgcaggcaatatcttcttgagaagcattgctatctgctttcccgaaaagagaggcggtagcactcacaggcaagtcaggcaaagcagtgttgcaaatatcacctatctgcaagttgacacgagttacatcccctttctcagccaactcggacacttgatgaatatcatgagttttcaacagcaaccttgatagtccctgcaaggtacctccaccaatccccaagccgccaatatgctgcaccttgtcgccgtcaattttcacaaaagaagtgccggtacccatgctgactacaatcagttggtctatatccgttgcatgtctggctcccaaaccattggcaataaactcatccgttttgcgagtaggcagtccatatagagggctgttgacaaatgcgcttcccactcccgttagcatcacctgctccacatcgaccagctgtataccattgtcataaatatacttaccgaatgctccgaataaggaagtcaccgggtcggtagccgtaataaacattggagactgtatctgttctccattaattccaacgattttcgtggtacttccacccacatctattcctattactatacccatagctccaagtaatttgcagcaaagttacaaaagaatcaataattgacaattgattaatgtgtcaatatgctaattggctgcgatatgtttatgctgtgccatcacgccgcaggtcattgacacattatcacattggcacattactatcggttaaacagctcgaaggtgaatttgcaaccaatttcctgatacttccagtttgcaaagctggcaaacaagccaaaatcaaaaatatgcgtaccaatgccataccctacttccagataaggtttcaagtgaggtactaccagtgcattcagatacagacgttcgttcaagacatactgggtatatttcatcaaatggcgaagcagaaggaaaggcgcttcgtatgtaaggtgtccacggatatatttgcgggaagagttataccaacgcccatcaagcaattggaacaccccgccaatatcatcgctccaacccataggcagattggagcgccgcaaattggcaaagtccacaaagtacagttctttctgattggtgaactctccccagccaaagcgccaataaatatcgcgcatcaatcccaaagaaacctgatgctgcaaatcgacctccacacgctcgtacgaaccgctgctctgcaatactccgctgatgccccgttcccaatccaccgagatggaagggtatttggagtgaaggttcaccttacggtcaccattcatatagtaatattgtcccggagtccaagacaaacggacacggggggcaaaactgttataagtatgccgaaacttattcaggacattggggtcgaaattcggaaagaacgacgagccgccggaacctacgtttgttacagattttaccgatggcatactcggatagttaagttcaaaccgggaacggttcacttccgtacgtctatgcatggatatacccacttccagcgacaagccgttcactatctcccagctatggcgcagattcagatacaagtccttgaaataatccagatgtatctggttgaaatcaaagatactgtcgggaatagctttcaagtcatccagcacatcactactataaatccggttaccattaccaaattccagatgaaatgccgcacgcttacgaggccaataatcaaaatcagacttcaccctccagtaaaattctttctctttaaaattataacctatccggggaacgattcgcagcaggcggtcgcccctgaatatacggttgtacttgaattcctgccgatacgaaattccatgtttgccgctataactcaaaagaaaaggattaatcaacggcgaacagcgtacacttcccaatttatcaaggtctactgtgtagcgactaatcagagcatccccaatctgtccccagaattccagattcttattgaccggcttctttttccggatgagtgtatcccgacgcaagaaaaaatcctgatacaatgtttcctcgtgcggggtcaacggaatgggacgtaaagttttaaagtaggcagtatcacgccgaaaagcattcgtatccgtacgcaacgtgtatgaatctgacaagtcatatttacttttcttcaccgacttccgtatatcacttccaggagctttctgaatgatgttcttataatcgagtacagcttcataagtaccatctaccacatttcccaaaaaacggaacgttgcatccacatcatactgcaacggaagaaattcgtccgaatcgcccacattacccatcttcaccagattattgaaccgcaccatctcattacgtccggaaaaacgcatctcgcgtacactccacacgttatcactcacaatcagataaccgcccaccagctgaaagcttttgcttttcggcataaaacggattttatactggcgagcatgccgttcccccatcaccgtatcaatccgataagtataatattttttggcattgggtgctaaaggagagagtagtttgtcatataatagggtagaagaatagatattgatgtgaaaatattccggcaatcgtccgtccatttcccaaaactcggaagcagtgccgacacttgcctttaccttctggtcatagatgtcgggagcagtaaaatgcaaatcgctataagtttccatcatatattcccgcaccccttttttgggccggaacatggaagggatgtagcggagaatatgattcttcttacggatattcacccagccctttatgtaaagctcagccttgtaactttcaataatacgttcataaaggggggcaaagaagatgactttctccatgatggagtctgcggaactcacatgtttgtcaaccggataagatacacgctccgcccctgccttctgtacaaaagaaaacaagaagcaaatccaaatccatataaacaacaaacgtttcaaccgcaatttctccttatagaatcgggacaaatatacggaagaattcgtgtaatgcaaaaacatgttccataaagaagcagggatgacacttgtgacaccctttattataaaacatatgttacgcgcgagagacaataatacacaagcacacatagtttgtgcaagataaatacgaacctatataaattgttataaaaagggcgccacaagtgtcatgtacagaatgattcgtaattgtgacgcatgaaaattactaatcacgacgcactaagattactaatcgtgatgcggaaagattactaatcatggcatggaacaaacgtaagctttgagtcgtttttccataacaagcaaactttttcagggggtctattctcaaaaaacactaatattttcgagaataccccctaaaaaagagggggtagttcagaaaaaacatgtatttttgcgcccaacaaccaataaaaggagagacttatatgtcaaaaatgcgattttttgctttgcaagaacttgccaatcggcaacctcttgaagtgaccaccccttcaaacaaactgtccgactactacggcagccatgtcttcgaccgtaagaaaatgcaggaatacctgcctcgtgaagcctacaaagccgtgaccgacgccatcgaaaaaggcactcccatcaaccgcgaaatggcagacctgattgccaacggcatgaaaagttgggcaaagtccctcaacgtcacccactacacgcactggttccagcctctgacggacggaacagccgagaaacatgacggcttcatcgaattcggagaaggaacggaagtgattgaacgtttttccggcaaactgctcatccagcaggaaccggatgcatcctctttccccaacgggggtatcagaaacacattcgaagcacgaggatatactgcttgggatgtttcctcacctgcctttgtggtagataccacactttgcatccccactatcttcatctcttataccggcgaagcgctcgactacaagactccattgctcaaagccttggcagccgtagacaaagcagcgacagacgtatgccagttgttcgacaagaatatcacacgcgtttataccaatttaggctgggaacaagaatatttcctcgtcgactcggcactgtacaatgcccgcccggacctttgtctaaccggacgtaccctgatgggacactcctcggccaaagaccagcagctggaggaccactatttcggctccatccccccacgtgtcacagcttttatgaaagaactggaaatcgaatgtcacaaactgggtatcccggtcaagacccgccataacgaagtagctcccaaccagtttgagctggcgcctatctttgagaatgccaaccttgccaacgaccacaaccagcttgtgatggatctgatgaaacgcatcgcacgcaagcatcacttcgccgtactgcttcacgaaaaaccctacaacggcgtgaacggctccggcaagcacaacaactggtcgctttgcaccgatacgggtatcaatttgtttgcaccgggcaagaatccgaaagggaacatgctgttccttaccttcctggtaaacgtactgatgatggtatacaaaaaccagaacttgctgcgcgcctccatcatgagtgccggaaacagccaccgtctgggagccaatgaagcgcctcccgccattctgtccatcttcctgggcaaacagctgtcttccatcctcgacgagatagcccgccagataagcagcagcaagatgacatcggaagaaaagacaacactgaaattaggcatcggacgtattcccgaaatattactggataccaccgaccgtaaccgtacttctccattcgccttcaccggcaaccgctttgagttccgtgccgcaggttcatctgccaactgcgccgccgccatgattgccatcaatgcggctatggccaatcagctgaacgagttcaaagtatccatcgacaaactgatggaagaaggagtcggcaaggatgaagccatcttccgcattatgaaagagaccatcatcgcctccgagcctatccgctttgagggtgacggctactccgaacaatggaagcaggaagccgcccgccgtgggctgaccaacatctgccacgttcccgaagccttgatgcactacatggataaccagtcccgttccgtactcatcggcgaacgtatcttcaacgaaacggagcttgcctgccgcctggaagtagaactggagaaatacaccatgaaggtacagatagaaagccgtgtgctgggcgaccttgccatcaaccacatcgtaccgactgccgttatctaccaaaaccgtctgctggaaaatctccgtggcctgcgcgagaccttctctcccgaagaatacgaagtcctcagtgccgaccggaaagagcttgtacgcgaaatttccaagcgcgtaaccgccatcaaggtacaagtacgcgaaatgaccgaagcccgcaaagtagccaaccacatggataactacaaagacaaggctttcgcttacgaagaaaccgtacgcccttatctggaaagtatccgtgaccacatcgaccaccttgagatggaaattgatgatgaaatctggccgcttccgaaatatagggagctgctgtttacaaagtaggcctctccctagcccctcccccgtagggagggggatagagatactacgataaacaattaagttactacgatttacgatttgacggtttacggttggagttactcatacaatcataaacccacctgctaatgagcagttgtttaacaatacaaacttcaatcgtaaatcgtctaatcgtaaatatatagattttcctttatctccccccctacgacatctttttgtcatatttgtgcaatatttaattttttctttttacatttgtgctgtataacacagttttgcagcagttatggtaaaagtaaacttgtctgatattaatgttccggagttgattgcagatatatggtctcccttgaatgacgaacaacgggaattcctcgccaaccacttcacactccagaactacaaaaaaaacgaagtcatccattgcgaaggcgagacacctacgcatttgatgtgtctgctgagtggaaaggtcaaaatctataaagacggagtcggtggtagaagccagattatccgtatgattaaacctgtcgaatatttcggttaccgcccttactttgcaaaaacagactatgtcacggcagcatctgcattcgagccgtctcttgtttgccaaatccccatgactgccttgatgactctgctcacacaaaacaacgaccttgccatgttcttcatcaagcaattgtccgttgacttgggcattgccgatgaacgcactgtaaacctgacgcagaaacatatccgcggaagactcgcagaatccctgctgttcctcaaagaaagttatggtttggaggaagacggctccaccttgagtatctatctctcgcgtgaagatctggccaatttgtcaaacatgaccacttccaacgccatacgtacgttgtcacagtttgccacagaacggttaatcaccatcgacggacgtaaaatcaaaatcatagacgaagaaaagctgaagaaaatcagcaagataggataaggaataagtgacaagggataagcgattaggggttagcataataaaaacacattgttaccatcctaacccctaatcactaatcactaaatcagtcctttcgcagacaaatatctttccgcttcaatggctgcctggcaaccagttccggcagcggtgatggcttgacgatagtgagaatcagcaacgtctccggcggcgaatacgcccggcactttcgtacgcggtgttcccggctcggtgacgatataacctacttcgtccgtatctacataaggtttgaaaatatctgagttgggtttatggccgatagccaggaagaaaccgtcaatagctacatcatagcgcttctcatcaggttcacccatacgctgtaccaaatgtacaccttccacaccgttctctccaaacaaacctacggcattatgttcgaacagtacttcaatcttgtcatgcttcatcacacgctcctgcataatcttggaagcgcgaagataaggtttgcggacaatcagataaaccttggcagccagtccggcaaggtaaacagcttcctcgcaggcagtatctccaccccctacaacagctaccgttttcttgcggtagaagaaaccgtcacaagtggcacaagcgctgacacccattcccgcatatttcttttcatcctccagccccagatacttcgcagcggcacctgtagcaataatcagcgtttcagcctcaatcatcttttcgtcatcaatcgtaatcttgtaaggtgcttcagcaagattggctgcggtagcaactccataacgcaaatctgcaccaaaacgttcggcttgcttccgcaggtcttccattaattccggacctccgataccttggggataaccggggaaattctccacatcagtagtggttgtcaactggccaccgggctgcaatcctgcataaagtaccggtgaaagattggcacgacctgcataaatagcggcagtatagccggcaggacccgaaccgacaatcagacattttactttttctgtttccatcattatattatttactatttgactatttacaatttactatttagcgcatgtcgatgacttcagccgtgggataggcttttttgtcaaagacaaagaaactatccggataggattgtccggtctggtagttattaataaggatagtagtcatatacttactcccccgtggtgccaagtccacttgatgcagacgatacgtatcctttgtcacaaacagatagacactttcagggtctttcctcttgtcggcagcagtcatggtgatgtaataaacagacttgtcttgcttaccaccgacactgctcaacttcaatctgtatccctgcttgtagagggacaaccaagcatacggattaagagtctgcaattcctcctgcgtaggttccgatacattcacctcatctgccgaagccacatagctccactgcgtatgtccgtcaaaccaagtcttcattccctcagtctcaaccacaaacttctcaccttccagatagagaactcccgcataagagccctgttgttcgttcacggtaaacgccagcttcacccctcccgctttccgaaaggcttcggctgtacgctccaatatattcttggcatccggttgttgtgccgacatcggcacagcaaacaacagcaatagcacaccaagtaaaaacttatcaaatttcatcattctataaataaccattccttattgcaaattgtttaaccgcatttccaggtcgctctcatctatacagaacacctcacgcgccttgctgccttgcgccggtcccacaatccccgctttctccaactggtccatgatgcggccggcacgattataaccgatggcaaacttacgctgaatgagcgacgtagaaccctgctggtgaataacgacgagacgggctgcatcctcgaacaaaggatcaagacgccccatatccacatcccccaaatcacctcctgcattttcatccacatattcgggcagataaaaagcggtggggtagccctgctggcgggcgatgaacttcgtaatctccgccacttcgggggtatcgataaaggcacactgcacacgcaccgggtctgctccctgcaggaatagcatatcaccgcgacctatcagctggttggctcccggacggtcgaggatggtacgcgaatcgaccattgccgatacacggaaagcgatacgcgccgggaagttagccttaatcgtacccgtaatgatgtttgttgtcggtcgctgtgtagcgataatcatatgtatacctacggcacgcgccaactgggcgatgcgggcaatgggcagttccacatccttgccagctgtcataatcaagtcaccgaactcgtcgataacgactacgatgtaaggcatgaacttatgccccttctccggattcagacgacggttgatgaacttctcgttgtactccttgatgttgcgcacatgggcagctttcagcaagtcatagcgggtatccatctccacacagatagagttcaaggtctgcaccaccttcgtgacgtctgtaatgatggcatcttccccgtcgggcaattttgcgaggaagtgatgctcaatcacggagtagatgctgaattctacttttttggggtctaccagcacaaacttcagctctgccggatgcttcttatataataaggaggtgatgatggcattcaaccccacggacttaccctgaccggtagcaccggcaacgagcacgtgcggcatcttgcacaaatccaccataaatacttcattcgtaatcgtcttacccagtgcgatgggcaagtcgtaagtagactcctggaacttcttgctgccgataatgctctgaccggatacaatcttcggattggaattgggcacttcgataccaatcgtaccctttcccggaatgggagcgatgatacggatgccgagcgccgaaaggctgagggcaatatcatcttccagaccgcgtatcttcgaaatgcggacgccctgctcgggagtgatttcatacagcgtcaccgtaggacctaccgtcgccttaatggtactgatttctataccgaaactacgcagagtattgataatcttatccttgttcgcgttctgctctaccatgtcaatggtcggaccattgtcatcgtaatgcttcatcaagtctattgtggggtaatgatagttttccaaatccagacggggattgtacggctccttctccgttcccacatactcctcctcttcagccttctcaacctggaatgccggctccttctctaccggctgttcccgaaaagggggcaccggctccggtgcaggagtctcaaaagtcatggtaacgtcctcatccgcagacttggcaggctttatctttccatcacttccacccaagtcaagggtgatttcattcagcggttcgtcctcttcttcctctgtagcaatctcctcctccttttcaagaaccttttccggctccgcagcttccggtgtcggagcagccgccttttcctttgcaccccaagaggtcttgaactcttccggcgtttcaccctgcacgctttccgccttctccttacgcttcaagaagctgagactgaacaatctgcgcaaccagatgacagtccgtgcactcagatagatgaggaagcaaatggcagttaccaacaatagcagccagactcccggcacaccgacttgagacacaagccagttactgacattgtatccgtgcataccgcccagatagaggaaagagtccttgtactggtctacaaacacaaaaccgaaaaataccgagaaccacaccagcatcaacgaacagccgatgaaccacttccacaagcgcaccacacgcacccgcatcagcttcaatcccgccacagccaggaacacgagaatcaggaaagacgatacaccgaaacaatcatttatcagatagctggccaactgcgcaccgcggctaccggcgtagttcttcaccccattattggtggaaatcagctcctgcgcactgcctccgtcaatgatgctctggtctgccgctcccgtgaaaaagaacgacgaaaaggcgagcaacaaataaaccgaaaagattaccagtaccaagccgataacgaaatgaacagtttcacttctaaataacgctgccactttcccaaaaaacgagagtgacagctccgtatctttagctgttgaatttttctttgccatattttttaaataactattgagaattgattgcaaaaataataaaaactatccttccgccgcgttgttttcattctttaatttctcgtctgccgattataggtattcctaatctacaactgtagttttatcgcatgttttacttacatgcttgcatgaaatgatatagcgcactaatttacaacagattgtgccatgcaagcagacctcatgcaagcatgtaggcagattttgcctacatggtgcaatccatgcaagccctatacgcatcaacctactctttttccttcaaaaaataaatcggctgtttctgcaaccctttgttcaccaacacattctcctcacaaagacgacgaatctgccgcgccgcagtcgtgcgggtcatgccgcaaatcgactgtacaacactgcgggtgatgaactcatttttacgtaaatattccaccactttttgcttcacctcatcatccgtcagcctctttttcatgagattccgcaatttcagcggctttactttcaatactcctatctcactgcgcaacgccttgtccggtctgaaagtgatgtttttcaacttcaccttagtacttttccgctttgtctccagtgtcaccggttccgtgcaggtcagcgtgggaacaaagtaaccgatgccgtccaaatgtacctgcctgccctcccccagctcgcgtcccacaaaatgcgacaaagcatcgagtaccgccagtacatccgtctcggtcagcgagcagtattcttgtatatgcctgcgcagctcatcggtcgtcgtggagccgttcagtttaatccggggatgcagggtcagctcttccccttgtttatccttcgttttcgggttttcgtaccaatcaaataaaattgccatattctttcctccatttttagattcatttctgttgctgtctgcaggtttcgctcatgcaaagtaccggctttcattaggcagagcataggtcttccttacgcaaagaagcgttcttccttctgctgaaagcttatcaaaaaaagatgcgcacagctgtggtttaccttcttcatatttgtgatacaccttcttcacaactatgagaaagacattccacgactgtgcgcaactacaaactacagaggcaaagataatgaaaagcagggggcttggcaaaggaatgctaatctttttcagattgaagcatgtaataatgcggtaataatagcgctatttgcccagctccataattgcaataattaatcttcttcttcatcatcgtcataatcttcatcgtagtcatcatcgtcaccatcccatctacacccacaagcatcacaagcataatcattaataccgcttgaatcaggatagaccaaatgcgagccacattcagggcaacgcaacttattgttatcatcgtcgtcgtccgcaatttcatcacatggccattctcttccacaatccggacaaacataattcacgccatcgaaataggcattctcattcaaacaaaaaatacattccataactatcttattttaaaattattacttttattcattattctttttgcatataagcagcatttaatcagcacaactcccaccagcatagaacagacaatgccaattgcaatgaaaagaggacttctatcagcggaagcaatgccgttttttgccatcactaaaagtcccgtctgaaagcaaacagccgacaacaagcagaacagcagcacattgcgtttccaatgttttggcatcggttcatttttttctacctcttctaccatttccttcattgcttcttcaatccatatcttcatcttcattgtcttgaggatttatttcatattttgggtctaaatcatatctgtacgcaagtaaaaaatcggcctttttatctttgggtttacaaagagaatacaatatggcccctactaccaatggggcagccgcaacaactgcaatccctgccagcataccacctcctattataccgccaattgcagccaatccggaagttattcctgctgccgacaacccagcaacaacacctgaagccgaaatcaagcttatcattcctgccaccgtacaagcagatcctccacttgccattattttggcaaccaaatcatctttgtcttttctagtcatctttttgtaagcatcaaaatctttgcctaatacaacggtgaacatgatacagaattctgcatagcacacgtcagtaggatagctcttgccctcggccaaacgtgtaattgcgtacttcgacattgtcatagccactgcaagttcatcaatagaaatagaagaattactcatgaatgaacgcaaaaacggagcgaaaccgactcctttcggaaattcttgattttccataatctttttttttaaagtttatattatggcgccctctgcctataaaaacaaaaagcaaccgttagcattaacgattgcaaaaatatgggggaagaatcaggcacgaaatagacgtctacgaaaaaggcaatcaacctctttatccattcctcatgttctttttaaattcttcccattgccagtcaggaaagttcaatgtatcatttacgattctccacgcgtcctttggtaggtctaatagagtttgcaatattttccatgcatttattattatagatgtagcatcgccctttgtacacacctttcttagtgttgccccgaaagatctgccgttcattgtcatcagaatcttgttgatatgcgtgtaaggaggtgaaacagccactattctattattttctttaccacacttagaagtatctaatgttttcaaataaaattgcatataccccagaagaagtataatcacatagacaaattgtttattagttttcttctggaaatctcgctctttcacatctccgtttcctactatccgccacgctgcctcatagtgtttttcttttgttaagtatccactttcagtggccttttccagcagcttctcaaacaattttttatttgtcttcccctttccctttttcgacattcggcctatcttttcaagcagttcctgatatgcctcttttgtaaagttaacatcagcagagaaacgtatcttatcctctttttgagactctttccgggagtcagaacgttttctcagagcctcaacatcttcattttcaagatacccctcatatacacttcttataagacgaaccgcccttgcacccacctccacaatatcctcatcttcatgaagagtaatccaaaagggccaataagtatggttgttcgcattatttgtaggcttaaagcgatgagtgaaagatttccccggaaatgtattttcaagaacagcagtaacataataacgaatatctttccattcttcattgaacattttttccccatcttcatcattcccatcaagaatcagccccttacatccataataaatgccgacaaccggttcatacacatcatattctatcagaaattcataccctctgcatccatccttactgtacaatgtccccagcttgtacatcatgtgatgtggagccttgttcccatgaaaagaagcatccgctttaaaatcctccacttcatccagcagcctcatcttctttttataaaactctgaagcttcgtcatttaaccttttccaatgctcccggttcctctctctgattttatctttctccatctcagagacaacctcctgacagttcacatcacattcggccccatcaaaatcaatgctaacactggaaaagtattcaagggctgcctgcacttctttctttttagcatagacctgcctcgctataaagatgcaagcctcccgcgtaaggtgatagttttccacgctcctacatgcaccagagcctaccccaaccatttcaaccatcaggttaaaatggtcatccacatttatgccatccgcttcggcggacttcatggcctttgccaatggaacggaaaatttctggtacgtactataccccaaagcagcgcacaattccctcgaagtccagtatgaccgtccttgcccattaaacttccttattttctcaaaaggtgatttatcactgattttcaattctttattcataaagacagaaacaaattacatgatataaaaatcctcatctataatgacgaacactcaacaacactaatatcaagcatgaagatagcaataaaaaaacatcccgtcacataattggaaacattttgtatacagagagacgggagcaatgccctatatttgcaaccggtcaatcaatcaccggccatgaaaaacaggtagtttatgagaaatttcattgtattatgcttattggcatgtctggcatcatgtacagacaaaaaagaattccagacaataagagaacgaatcgatttatcaggaaattggaacagttcattagggaactgcacattgcccggtacgacggatgaaaacaagttgggagacggcaggcatcccaccaatgtaacctcccagttgacacggacttatccctactccggcatcgtagaatatgaaaaagatgttgaaattcccgtacagatggaagggaaacgcctgatactcttcatggaacgtacaaagcccagtactctctggatagacggggacagcgtcggcacgttgggacatatctatgcacctcactgctatagcctgccggccttggcacccggcagccaccatataaagatacgcattgacaattcccccagctccgtaccagccgaaatccaaagctcgcatgcctggaccgacggcacacaaaccaactggaacggcattctgggcgatttctacatcgaagcgaccccacacacctatctcgagcaggtacaagtctacccgtctgtaaaggagaaaaaggcccgcatccatgtaaacatatacagcgattcggagcaatcgggcgtagtgaccctttctgccaagacgtggaacacccaacaagaacaccagttaccggacatggaaaaacaagtcggcttgagcaaaggtgaaaataaaatagaactgacgctcgacatgggcaaccggatgcagacatggagcgaattccaccccacactttatgcactgaacgtgacccttgccacaaacgagggtaaagacaatataataacagatttcggtatgcgcgactttgccaccgaaggtactcagttcaccataaacggcttcaagaccttcttgcgcggcaaacacgacgcttgcgtattcccacttaccggatatgcgccgatggatgtaaagtcctggcgaaaagtttttcagacagccaagagttatggcatcaactactaccgttgccattcctacaccccgccccgcgccgcttttgccgctgccgacatcgagggtatctatttccaagccgagttgcctttatggggaagcatttcaccggacaaccatcgcttgaatgacttcttgctgaacgaagcctatatgaccctcgactacatgggcaatcacccctcattcaccatgttgggactgggcaacgagttgggtggcgacgttgacctgatgcgcaattggctggacggattcagaaaacatgacaaccgccatctctattcgttcggttccaacaacttcctgggttggggaggtgccatagacggtgaagattatctgacaacctgccgggtaggaggaggcgaaggctatacaacgcacgtacgcagttcatttgcctttgtcgatgccgaaaagggaggtatcttgaacaacacccgtcccaatacccgtgcggattatactgctgccatagcgaaatctccccgaccggtcatcagtcacgaaaccggacagttccaaatttatcccgactacaaggagttggagaaatacaccggcgtattgcatccatataacttggagatattccgtgaccggctcaatgaaaatggactacaggaccagattgacgcattccatcaggccaccggccggtttgccgtcgaatgctacaaggctgatattgaatacggcctgcgcactgccggtttaggcggattccagatgctcgaccttcaagactttcccggacaaggctcggcactggtaggcattctggatgctttcatggacagcaaaggcattgtcactcccgaaacattccgcggcttttgtgctccggtggtaccgctggcgcttatggacacctactgttacagcaacaaagaagagctgaacataggcctcgccctgacaaattacgaagagcaaccatggtctgatgcattatactggcgtctggaaagcctgagtgacagcgtaacttttgttcgcgaaggcaaagtccccgcccatgtagagcaaggaaaagtaatgcaggtgggcgagttgaaaagcacccttaccgaaatagacaagcctgcccaattgcgactgacactgaccaccgggaattatcataactattataacttatgggtataccccgaccggacaccggaaagcgaagcggacatcttcatctgtcagtccttggatgacgaggcgcgaaagagactgagccaaggagggaagatactgcttatacccgaccacaaagccattgaagaacagagtgtaggcggactttttactcctgactactggaactatgccatgttcaaaagcatttcggaaaacgccggccgcgaagtttcgccgggcaccctctccttgctgatggacgagaaacatcccttgttccggcagttccccaccgagtgccatagcaactggcaatggtggagcatcgtacgccatgcccgtccctttattctgaacgctacacgccacgaatacaagccgcttatccaagtagtagacaatgtggagcggaaccacaagttaggcttgctgttcgaatttgccgtagacaacggtaaggtattggtttgtatgagcaacctcgaagcaattcgccacactccggaaggaggtcagctgcgcaatgccattttaagctatatgaagtcggctgagttctctcccaccgagacgctgacctcacagcagttgcagcacatattaacaaccgaggtgaaaaagcaagacattgtcggcgtgaaaaaccagtcggattacgacgtacagccggaataaaaaataagtatgagaagtttcatcataattccacttttcctcggctgtcccgtcatttttcagtagctttgcggactttaatacagcaaacaacccatgaaacttacccttatacgcaccgctcgtgaaaccggcaaagagacattcagcacatggcccagcgacaccttgatggagaagatgaaaaccgagaacaaagccggacacatatccgccttgcgcagcctcattccccacatcaccggaagcaacggacactacccctgcatagacaaactgccacgcatctgccctgccgcagaatatgcccgcagcaaagagggggaaagatacctgaaaacctacaacggactggtacagattgaagtcaaccacctggccaatgccgtggaagtggagcaagtaaagcgccaggcggccctgctgccgcaaacttttgccgccttttgcggaagtagcggacgaagcgtaaaaatatgggtactgtttgccacccccgacggttcgcgccccaggcaggaagaaaaaatcaggctgtttcataccgctgcctaccggctcgccgtaaactgttaccagcccctgctcccctaccccgtcacactgaaagaacctgccgtggagcaaagctgccgcatgacgctcgatgaccgtccctattacaatccgtctgccgtccctttctgtttggaacagcctttgtccgtgcccgacgagcccaccttcggccaacggaaacagaccgaagcaaacccgctgatgcgcattgcccccggctatccggcctcccaaaccttctccatcctcttcgaagccgccctgaaccgtaccttcgaagagctggaaaactggaaacggggcgatgaccttcgccccctgctctacctgcttgccgggcattgctacaaagccggcattcccgaagaagaggcagtacgtcaagtcatgatgcactactaccgcgaagcggatgaacagctggtacgcatgaccctgcacaacctctaccgcgaatgcaaaggcttcggcacccgcagcagcatgacccgcgaccaaatcaccgccttccgcctggaagaattcatgaacagacgctatgagttccgctggaacaccgtgctgggagaattggaattccgccaacgggactccatacacttccacttccgccctgccgaccagcgggtaagaagcagtatcggacagaatgccctgaaagaaggaatcagcgtatgggacagagatgtggcacgctacctcaactcggacgccattcccttgtacaaccccatcgaagaatatctgaacagcaccggacattgggacggcaaggaccgtatccgcgcattggccgacctcgtcccctgcaacaatccgtactggcgggaactcttctaccgctggtttctcagcatgacggcgcactggcaaaacatcgaccgtcagcatggaaacaacacgtctcccctactggtcggagcccaaggctatcgtaaaagtaccttctgccgcatcctgctgccacccgaactgcgcttcggatataccgacagtatcgacttcaaaagcaagcaggacgcagagcggagcctcggccgctttttcctgataaacatcgacgaattcgaccaaatcagcgtcaatcagcaaggttttctaaagcatctgctgcagaaacccgtggcaaacctgcgcaagccttacggcaccgccatccaggaaataagacgctacgcctcctttatagccaccagcaaccagaaagacctgctgacagaccccagcggcagccgccgtttcatctgcatcgaagtcaccggccccatccataccaatgtcaccatcaactaccggcaactctacgcacaagccatggatgccatagccaaaggtgaacgctactggctggacgattccgacgaagccatcttgaaacagaccaaccgggagtttgaacagcccacaccgttggaacagctcttcctctgccacttccatcccgccgaaaatgaagaggaaggagactggatgacccctaagattctctccttcttgcaaaccaagaccaaagaccggctgtccatcaataaagtggctctgttcggacgtgcactccacaaactgggcatcagcagccgccggaagacaagaggaacagaatatcatgtagtgaaaaaagaataatcctgccaattaatttgcttctactttcggtttgcgctatctttgcgtttcaaatcaagaagatatgaaaaaagaaagtcaagtgatattcgaccggaatgccgtagagtttgtgaccgtagccgccgagttttgcaagtttctggaacaagcggaaggggtgaaacgttccgcgttcgtcgatacctccttaaaaatacttccgctgctctacctgaaggcctccatgctgcccgagtgcgaaaccataggagacgaggcgccggaaacattcgtcaccgaagagacctatgaggtactccgcatgaacctcgccaatatcctggccgagaaagacgactacctggacgtattcgtatccgacatgaagtatagtgaccagcccatcaccaggaacatttccgaagacttggccgacatataccaggacatcaaggactttatcttcgtattccagctgggtttcaacgagacgatgaacgattcgcttgccatctgccaggaaaacttccgcctccattggggacaaaagcttgtcaacaccctgcgtgccctgcacgaggtgaagtatgcgcaaggcgaggatgaagaggaggaaaccgcagactttgaatattaaattatggttatcaaaagaacaatagataaagaaacagtgaaagacctgcccaaagccacctttccgggacagatacatgtcgtacagacaccgtgggaagcggagaaggcagtcgcctatctgaagtcctgcccgttgctgggcatagacagcgaaacccgtccatcgttcacaaaaggacagatacacaaggtggccctgctgcagatttcctcagaggaacattgctttctgttccgcctcaacctgacgggactgactctgccggttatcacattgctggaaaacccaagtgtaacgaaagtaggcctttccttgcgggatgacttcatgatgctgcacaagcgtgctcctttcgaacaacatgcgtgcattgaattgcaggaatacgtccgcgctttcggcatccaggataaaagcctgcaaaagatatatgccatcctcttcggggaaaagatttcgaaaagccagcgcctttccaactgggaagccgaaaccttgaccgaaccgcagaaactgtatgccgccaccgatgcctgggcatgcctcaacatctacaacaagctgcaagaactgaaacggacaggagattttgagatagaagccaataataatgtggtaatgtaatgcacattatcacattaccacattaatcacattatatatatgtacaaagtataccttaaacccaataaagaggagtcattaaagcgttttcacccgtgggtgttttccggcgccatcgcacatttcgacggagagcccgaagaaggggaagttgttgaaatctacacgtccaaaaaggaattcatagccaaagggcattttcagattggcagtatcgccgtacgcgtactgaccttccgtcaagaagaagaaatcaatgcggacttctggaaacgcaaactcagcatagcatacgacatgcgccgcagtatcggcatagccggaaacccgacaaacaacacctatcgcctggtgcacggggagggagacaacctgccggggctggttatcgacatttatgcctgtaccgcagtgatgcaggcacattctgccggcatgcacctcgaccgcatggccattgccgatgcccttaccgaagtgatgggcagccagattgacaatatctattacaaatcggagacgacccttcccttcaaggccgacctctatccggagaatggtttcttgaaaggcggcagcacggacaatgtagccatggagtacggcctgaagttccacatcgactggctgaaaggccaaaaaaccggtttcttcgtagaccaacgcgagaaccgttcgctactggaacgttatgccaaaggccgcagcgtactgaatatgttctgctataccggcggcttctccgtatatgctatgcgtggagacgccaaactggtgcattccgtggacagctccgccaaagccatcgacttgaccaacaagaacatcgaactgaacttcccgggtgacacccgccatgccgcctatgcagaagatgccttcaaataccttgaccgcatgggcgaccaatacgacctgatagttcttgaccctcctgcttttgccaagcaccgcgatgccctgcgtaatgccctgcaaggctaccgcaaactcaatgtcaaggctttcgaaaaaatcaagcccggaggtattcttttcactttctcgtgctcgcaagccgtcagtaaagagaacttccgcacggccgtgttcacagccgctgccatgtccggccgcagcgtacgcatcctgcaccaactgacacaacctgccgaccacccggtaagcatctatcatccggaaggggaatacctgaaagggctggttctatatgtagaataaaggaaaaagaaggcctcatcggccttcttttcttaaatagagttaataaaaagtagaaaagtgccaaaatagcatgttatataacataaaccatgtatatttgcactgtgtttttcatggtattagatttaaggttaataaagattgggtgtctgggatagatacccttctttttttataatacattccttcccaaaatccatccctcattaatctctttcgttgaagaaaaagccgtacagaacttgtttttctcctagtctcattgtacatttgcatctattacataatttaaaatataaaaagctaatattatgagcatcaaattccgactcactgccatgcaattcctgcaattcttcgtttggggagcatggctgatttcattaggtggttacatgggcggtacgttacattttgaaggcggacaaatcggagcaatctttgcaaccatgggtatagcctcactgataatgcccggactgaccggtatcatcgccgacaaatggataaacgccgaacgcctttatggcatactccaccttatcggtgccggtgctctgatttatgcttccactgccactacgtacacccacatgtactgggccatgctgctcaacatgcttgtttatatgcccacgctatccctggccaacaccgtgtcctacaatgcgctggaaagatataaaatggatttggtaaaagacttcccccccatccgtgtatggggaacggtaggctttatctgtgccatgtgggctgtggaccttaccgggttcaaggcaagtgcggcacaactctatgtggcagccatctcggcagccatgctggggctttacgccttcaccctgcctgcctgccctcccatgcgctgcgaaggaaaaacgatgctctccgctttcggactggatgcactggtgctgttcaagcgcaagaagatggccatcttcttcctattctccatgttgctgggagccgccctccaaataacaaacacctatggtgaccttttcctgggttcgtttgcttccataccggaatatgcagattcgttcggtgtgaaacactccgtcatcctgctctccatctcgcaaatgagtgagacgctgtttatccttgccatccccttcttcctgaaacatttcggaatcaagcgtgttatgttaatcagtatgtttgcatgggtattccgtttcgggcttttcgccctcggagacccgggaagcggactttggatgctcattctctcgatgattgtctacggcatggcatttgactttttcaatgtatcgggctcgctgtttacagaaatggaggcacatcccagtatccgtgccagcgcacaaggcttgttcttcatgatgacgaacggtgtgggagccatcatcggaggttatgccagcggagccgtggtggatgccttctcggtatatgccgaaggcggaggactggtaagccgcgactggacaccggtatggtttatctttgcaggatatgccttagtcattggtctgttatttggaatagtattccgctataagcataatccggagaaaatagagaaaaactgattgaaaatcaggttgatttaataggtatgaataagaagaagatagaactacaagtactaaacatttccaacagccaggcgcaagcgggcgcctatgccctggtactgggtgaagcgggcggcgagcgtcagcttccgattattataggtgccaccgaagcacaagctatggtcatcgagatgaaaggtattgtaccgccccgtccgctgacccataacctattcgcttccgttcttgaagtgctgggcgtaaaactgatgcgtattcttatctataaagtagacaacggagtattctactcttacctttatatgaaagccgaagaaaccattctccggattgatgcgcgtaccagcgacgccgttgccctggcattgcgcatgaatgcccctatctttgtctacgaagacatcctcgaagcagaatgtctgaaaaccgtcgaaggttccatcgacccgatggaaggcagcgaaccggacaaagacgaactgctgcaggaagacacgataggcatactgaaaacggccctgcaaaaagcagtcgatgaagaggactatgaacgtgccgcacagctaagagaccagattaaccaactcaagaacaatttgtaatatgcacgtattctatacccccgacatacaagcccacgcagagctgcccgaagaggaagccgcacacgccgtacgcgtcttgcgcttgcaggctggagacgaggtcatgttgacagacggaaaaggctgcttttatcgtgccgaaatcagtacggctacaaacaagcgctgtctggtgaatatcctggaaacccttccgcaagcccccttgtggaaaggtcatctgcacattgccatggcgcctaccaagaatatggaccgcacagagtggtttgccgagaaagcgacggaaattgggtttgacgaactgacattcctgaactgccgtttctcggaacggaaagtcatcaagacggagcgcatttccaaaatactggtttccgccatcaagcagtcgctcaaggcacgcctgccccaactgaatgagatgacagacttcaacaagttcatcacacagccttttccgggccagaaattcatcgcccactgttatgaaggcgaaaaaccgcttttgaaggatatggtacatcccggagaggatgccctcgtactaatcggtcccgaaggagacttcagcgaagaggaagtccggaaggcggcggaaaacgggtttatccccatcagcctgggaaaatcaaggctgcgcacagagacggcggcactggttgcctgccacatcctcaacttacagaatcaatgatactcactaaaacaaaaactatatgaaaaagaacctattcttccacttctcagtactggcaatgctcatcgtgctgataagcgcttgttcgtccaaaaagtcggaatataccaatgtgattccctccgatgcctcgcaagtcatcgctgtcaatttaaaatcattggcagacaaggccggtaccaaagataaagagactaaagaagcactgcaaaagctgacagatgccttgaaaagcgatatgaatgcagccactttccaacaattggaggctgtactgaaagaccctgccaaatcgggagtggacgttcatgcgcccatctatatcttcaatgctccctcgttcccctacaccaccatggtagccaaggttcagaacaaggatgacttgctgaaactgctggaagttacggagaaagaacagataatcagccacgtgtcagaagcggacggctacagctttgcacaaatcaacaagcaggcactgctcgctttcactcccaccacgcttatggtggtgaactacaccggcacatcgcaattggaaaaagtcaaggaggaaatacccgccctactgaaacagacggaagagaacagtatcaacagcaatactgctttcaagaagatgcaaaagcagaacggagacgtcaacatgctcattactccctccagcctgctgagtgcctatgccagtccgctgaattacggaatatcccaaagtattgatttgaaagatttgaagatgctgggaagcctctctttcgaaaaaggaaaaattgagctgaagatagataactatacagagaatgcagaactgaaagctctcttcgaaaagcaggccaaaagcacttgccccatcgaaaacacatttctgaaatatttccccaaatctacgctggcactgctcagcataggtatcaatggagaggagttctacaatgtactgcaagagaatgagcagttccgcaacgatttctccattaccaaagccgctgaagtaaaggacttgttcagtgctttccacaacgacctgaccataggccttatcaatgtaaccatgaacagtaatccttctttccttgcctacgccagcgtaaagaacgatgctcctctgaaagccctttatgagaaaaagtccgaactgggactgaaacgcggcgaagacatcgtgaaattgaatgagaatgaatatgtctataaatcacgcgctatcaacattttcttcggcatacgagacaaacaaatgtacgccaccaacgacgaactgctgtataagaatgcctgcaagaccgctgacccgtctgccaaagaaacagacttcgcttccagtctgaaaggcaagcgtacagcctttgtcatcaatgcggaagccgtactcgacctgcccgttataaaattgcttgttgggttcggcggacaagagtatagcacctattactcgctgctcggcaatatctcgtatctggaagctgtcggtaacgaggacaaggcaaccgttaccctgcaactgaagaataaggatgtaaatgcgttgaaacagattgtggacttcatcaagcagtttgcaggaatgtaatttaaggattaaagattagagattaaggattaataccactcatgaataggattcacctacggcaaacactacctcaagtgtttgccgaccgtgatgccattacctcagacgtatggcatcgggacattacgttccacaaagggaaacgttatctcatagaagccgcttcgggtaccggaaagtcatcgctttgtagctatatttacggctatcggcacgattatcagggaatcatcaactttgatgaacgcaacatccgttcactctccgtcaatgactggacagatatacgcaaacactctctcagcattctttttcaggagttgcgtatctttcccgaacttaccgccatcgagaacatacaactgaagaaccggcttaccaatttcaaaaaaaggaaagaagtccttaccctctttgaggccatcggcattgccgacaaggtaaacgaaaaagccggaaagctatcttttggccagcaacaaagagtcgcctttatccgcagcctctgccagcctttcgacttcatcttcctggacgaacccatcagccatctggataacgagaacggaacaatcatgggcaaactgctgacagaagaagccagccgccaagaagcgggaatcatagtgacttccataggtaagcatctggaactagagtatgacgaaatttataaattataaatgtagctaatatgaatcgacttgtttggaaacttctccgccagcacatcagtgtcggacagctggcaggctttttcctcgccaatctcttcggcatgatgattgtattgctgagcgtacaattctatcgtgatgtccttcccgtttttacggaaggggatagtttcatgaagaaggagtatatcattgctaccaaaaaaatcagtactctgggcagctttgccgggaaaagcaataccttctccaaagaggagataaaggacctgaaagcccaaccttttactaagggggtaggcgcgttcactccttcccagttcaaggtttctgccggactcggtatgcaggaagccggtatccgtctgtcaacggagatgtttttcgagtctgtacccgacgaatatgtggatgtcagtctggacaaatggcattttgacgaagatgcccgggtaattcccatcatcattccacgtaactatctgaacctctacaactttggctttgcacaaagccggagtctgccgaaactctccgaaggcctgatgagtctggtacaaatggatgtgatgatgcggggtaacagacgtgtggaacaatataaaggcaacattgtaggattctccaaccggctgaataccattctcgttccccaatccttcatggactgggccaacaagaactttgcaccggaaaaagaagcggaaccgtcccggctgattgtggaagtgaaaaatcctaccgacacagccatcaccgactatttccagcaaaagaattacgaaaccgaaggcaacaatctggatgccgggaagacaacttatttcctgcgcctcattacggccatcgtcatgggagtaggattgttcatcagcattctgtcattctacatcctgatgctgagcatcttcctgcttctccaaaagaatacggtaaaactggaaaacctgctgctgataggatatagcccgacgcaggtagccacaccttattatatactgacagtagggctgaatgtactggtactgctcctcgccataggctgcgtggcatgggtgcgcagttactatatagaagtagtccaaagcctcttcccgcaattggagagcggatcactgcttccatgtatattgatcggttgcctattattttttgctgtatcactgctgaatattttggcaataggcaaaaaaattatcagtatctggaaagggagaaaataaagatggaaaaattccatccagcaaatataaagttcatgatatgccatcattacagcaagcatccgcctctacatataccgcacccgaaaggagatggaacggaaacacaaagaagaaatccttttgctccgcatccgcaacttgataaagcagtgcagccgttatgaagcggaacaaaagaaatgtacggttgccacctctcggaatatgcggaaaaaatgcagaaatcaacctgagtgttgttccgtttcaacaagattgttgccgtctaaagaggattcagggctacttttgcagcataattttaaaagaaccatgaaaatgaattttatgaaaagagccggcttcgtgctgacttgtgcaaccatgcttgcaaacttgtgtgccgcccagaacacagaacgcacacctcaaggaatgaaatgcaccacataaggaatggacatccgtgtggaattctattcgccttccattgtgcaggtttcaaaactcccgaaggcaaaccctacaacaaagaaagtctggtagtggtcacaagctgaatgccaagctgatgattgtggcatgacccggctttggcacccacacagagcaacgcaaggagttggatgccaaagggatgattatcaacttcaacacttggccacccaaaagtggcacacgcccctacgacgtctacaatcccgaagcaagggacatttattggaaatatctgaataaaggcattttcagttacatcggcaacgacgactggtggctcgattctacagagactgaccatatcaaccgacaagaatcggactatgaccttcccactcacttggggtcttaccggagtgtaaaaaatgtctactcactgatgaacaacagcggaatagcctcgcatcaaaaggctttgagcaaagacaaacgcgttgtcatcctgacccgttccggatttatcggacaacaacgttacggctgcaacacctggagtggtgacgtgacctccacttgggacatgctggagaaacagattcctgccgcactgaactataccttgatgggcatcccgaactggaacagtgacataagtggcttctttaccggacgctggatgcagttcggcactttctgcccgataatgcgttcgcacggtacggagttgccccgtgaaatctggaacttcggcaagcgtggcgagtggtgtttcgatgcccacgagaagataattaatccgcgctatcgccttctgccctacgtttacagcactttctgggatgtgttccacaatgacggtacattcaagcgtcctttagtaatggattttgcgccggtttacctccctcaaggcgcagactggtgggacttctggagtaacgaaaagcagcaggacagacagaccttgaaccacagtgtatcgtcagaggacaaggcccgtcctctgacgatagaagagcgggaaagcagttttccgaacatgctgaaaagccgcaagttcaaggttgtcctggtcggtcaggactccggtacgggagaccgtccgatgaaaggcagaaagacaataagctatgcaggaaagaaaaagagtataaagctgtaacagtaaaaaggaggaacgtgtcaaaactaccttactattttttaggcgcggattacgcagatttcaagaatccaatttgcatagtccgcgttactccacgtaatccgcgcctaatattacagcataatgaagtggtcatatactttgctaaaaaggaaacaacaacggcagcacaaataccatcaccactcccataataatctgcaacgggagccccacttttatataatccatgaatgtatattgtcctgccggcatcaccagtgcattgggcggtgtagagaatggagaagcgaaacacatacttgccgcaaccgtcacggcaaacaagaacggaacgggacttactccaatctgaatcgcactttgaagagcaataggggccatcagcactgccgtcaccgtattgctgatgaacatggtcatcaatgaagtggtgaaatagatacctgccatcaacacaataggaccataactgcccaacccacttacaagactgttggatatatattccgaggcaccggtcttttcgagtgcaagagacatggggagcatggctgcaaagagtacaattgtttcccagtttatcgttttataggcggcttccacattcctgaaacatcccgtcagcaccatcagcaaaccggcaatcatcaccgctgtcaccggggccaccggaataaagtcgaagaccatcatggcaaccatcagtaccatgatagcggcagctatgggcgctttataatccagcgtcactttggcggcttctgccaaaggctgtcccaataccacccaatcggaatcttccctgcttatccgtgcgatgtcctgccacgcaccctgcaccagcaaaacatcaccactatgcatacgctcacgtcccaattcacgtaatatatattcctttttacgacggatgcccaatacatttacattaaatttatcacggaacccagcttccttcaccgtccggttcacgatattggaagaaggcatcaacacaatttcggcaattccgatgtcataaaagtcaagggacttgtcggctttagaggcttcttcagtggtatgcccgtcgagcatttccattaaaaagtcttcagcaaaacgatttacgttcgatacctctcccgtaatataaagcacgtcgcccacccaaatagtcgtatcgggtgatgccaatttctgggtaatagttttcaggaatctatgttgggaagagtctacacgccgtacttcaatgatattcagaccatacttgcggcgtacatccaggtctatgatggtttttcctatcagacgggagtcattgacagccctcaaacggaacaggttgctggaaagtccgtactcctgtaccagttggtccaatgatttacctgacaatgttccgtcattctttttgcctttcttggagagaaaccatttggtcagaggcattaaaaccaaagttcccactatcacgcacacaatgcccaccggcaagaaggagaagaaagacagcggttcaaagcccgctcccgtcaatgtattctgaatgaccaagttaggaggcgtaccgataagtgtcatcataccgcccatactgctggcaaaagccaaaggcatcaataaacggctgggattcattccggcactcagcgccaagctcaccacgataggcagcatcaaagccaccgttcccgtattgctcacaaaagcaccaatggcagaggtaaccagcatcaccagcaagaagagtttcagttcgctcttgcccgccagctttaaaatgcgcgaacttatcattttagccagcccggtctgaaaaatggcgccgcccacaacgaacaaacccaccatcataatcaccaccgagttggagaagccggaaagggcctcttcaggagtaagaatctgaaatatcaataaaccaatcagcgcacaaagcgccacaatgtccgaacggactttgcctgctacaaaaaaggcagcggagagaacaaggataataagggtaatcagcataaatatgtatattaagaatgcacaaatatacttatttacgcatgatcacacaaccccttactacctcaaattactgattcagaactcgaatttttccaacttcatggcagccagcccctggattttgggcaccagggccacaaaatggtctgctttttcatgggcagacaatgactctgcatctttccatgtttcacaaatcataagaacatcgctgcgagtggcgctctcaaacacatcataggcaatgcatccattgtccttcaaggaatatgcgaccagttctttggcagattccaatactgcggcacggttctccgcacttacctgaataaaaacatttaatctaatcatacttgtataaattttaagtgcatcgcaaatttaagcagaataaatatctccaccaacaaaagtaaattgttattaattcctttcccgccggatgaaccaatctttggcaagtatgttgtctcatcagaattgattctaactttaactattaaaaactgacttgattatgaaatgtaaagattctaatttctggatcggactgggaataggttcggttgccggtgcattggcctaccacttctcccgtacggagaaagctaaaaagctggaagatgccatatgccgtgccatccacaaagcaagtggcgaagccaaggagttcattaacactgctgaagaagaagcattgcacgttggcaccaaagtagcagacaagatggcccatgaggcccatgaggccgcagagaaagctgacaatctgaaaaacaaggttcacaattttgccgatgctaagaaataaaacaagcacttggaaacttctgaaggggtgtgtcaaaattcaccacagattacacggattaacacagaatgagcttaatctactgataatcaaagatgcttatctgtgcaaatctgtgtaatctgtggtgaataccagtttcgacacaccctctttgcatatcgacccatcagttctgcagactgcgccgattcaaaatatcattcatatgctccaatgcccatcctaccaaagattcaatatgcggcatcaggctacatccggtttctgtaaggttatactccacacggggaggaacttccgcatagactttcctgacaatcagcccgtccgtctccaatgagcgcaatgtaaccgtcaacatccgctgggaaatatcccctatggttttctgtatattgcaaaagcgcatcgttccattcgctttcagtgtgaccagcacaagcattgtccatttgtctcccaacctgctcagtacatcccgtaccggacaagcatccatacgatgaaaattttccattcctttattttaccaatcagttcaacctcagcaatggcgactctatgcttagtgtccggcattgcaccacaaaagtaataaacttactcaaaataactatcgtttcatacaataataaaaacattctttatactcataaaagcatccgtctcatccggattatttgtatgtttgcaacatcatttcccattcatatgtaactgcaagactcttatgaacgtaaaaatagaagaaagctggagaaaacgcctgcaagaggagtttgacaaaccttattttgagaagctggtagcatttgtaaaaagtgagtacgggcatgccaacgtgctacctcccggccatcagattttccatgtcttcaactcttgcccgttcgaaaaagtgaaagtcgtcatactcggacaagacccttatcctaatcccggtcagtattatggagtctgcttttccgtaccgaaaggagtagccattcccggttctctggcaaacatattcaaggaaatacatcaggacctgggaaagcccattccgacttccggaaatctggaccgttgggtagcgcaaggcgtgtttcctatgaattccgtcctcacagtacgtgcccacgaaaccggctcgcaccggaacatgggatgggaaaccttcacagacgctgttatcaagaaactgagtgatgaacgggagaatcttgtattcatgctttggggagcgtacgcgaaagaaaaagccgctttaatcaatagcagcagacacttgattctgactaccgtccatccgtccccacgttctgccgaatacggattcttcggttgcaggcacttcagtaaagccaacgatttcttacggagcagagggatacaagaaattgactggtaacacgctacaatactccgctgactccgcttccaaacaaagcaaagtcccccaggcacgggtcatccggaaaggcctctgccagagcttcagtaatccggcgggcattcttcaaagaaaatgtttctgtctcggtgagtcccaaagcataggccacacggcagacatgcgtgtccaaaggcacaatcaggtccctgcaatcaaatctctcccaaataccaaaatccacttccggacctttccttatcatccagcgcaaaaacatgttcagtttcttttgggggctctttgccgagacttccaaaaatgcacataacctttccatcggattaccggcatacgtacataaggcatcctccagactgtcaaaagcagaataggcagcatgcaaacgcctgaaataggaatgaaagtcagcataagaaagcattcggtaaaaactgcttctgtccgtagcagggaagtcattcttccatcggcaggacaacacgtattgatgaggtgatacccccatcaacctatgcaactcatcagcctttttcaatatctgcttacggttgccgaaactcatgatggcagtcagcagcccactgatttcaatatcctgcttccgttcatagcgatgtggaaactgtacggggtcgttctgaatgaagccggcgcaatgataggccgccgcccactcccaaagttgtcttttaatctcctcggtcatctgcaagcatttgttttttcatctgaaatgcaaagatattgcaaatcgaatgcaaaactttcatgcttgcacgaaaaagttgtgccgggatatagcttatcttatttaaagatattgcatttatagcaacatcggacaagtaacctatttcttttcctcctatttttgcaacatgaaaaagcccaatagagccatgcagcagaaaaagacaacccaggaggaataccaaaagtgtgtgaacgcagtagtggattatataaatctgcacctcggagaagaaattgacctgaaatctttggccaggatttcccatttctctcccttctacttccaccgcatcatgaaagctttcctgggtgaacccgtcggtacgttcattgtccggacgcgtaccgaagccgctgcccggttgcttcgttactcggacatgccgatagcggacatagcctaccgtataggctactcttcgccttcgtcactgtcgaaagtattcaagcagttctacggcatttcaccattagaataccgtaacaataaaaactttgtaattatgaaaccagccattattcgtccggaactggaactgaaacacgaaatcaaagaagttcctgcccgaaatgtgatttacatccgcctctttggcgactataaactgaacgactattgcagcgcatggatgcgcctttgccagttcatccaggaagaaaaactgcctatgggagaagtgatgccctactgtatctatcacgatgaccccaaagtgacacccgctgaaaagctgcgtaccgatgtatgtatggtcctaccctcatttgcaacggccaaaggagacataggatttaaacagctcgcggcaggccgctatgccatattcctatacaaaggtccatacgaacatctgcaggccgtatacgataccatctacgggaagtatatccccgaaatggaatgtagcttacgggatgaatccagtgcggaacgttacctgaacaaccccgcagatacggcgccggaggaactgttgacagagatttatattccggtagagtaggcaaactgttctgccggagctatcagactttctccccggaagagtttaggagccggacagcgaacaagtattcgttcctccatggagtaaaaatcgttccaccatggtggaacgatttttactccgcggtggaatgatttttacctcatgatggaacgaataaatatcaggcaagccggtcgatactatattagatacccatatctatactgtattgtaaaaaaaggacactcccttgtctgtatgcttgtttttattcattaattttgcacgacgcaatgcgaatcaagcaattgacgcaaacagataattttaaaatctccattaaaatcaagataaaaaatgcaaaatgtttccataaaagggtttatatatgcggctctctcctctgccaccttcgggctggctcctttcttcaccatttcattactccttgcgggcttctcctctttcgaagtattggcctaccgatggggaatagcttcacttaccttggtcgttttcggcattatgctgggcgagacattccgcatcagcaggaaagactggggaacggtgttcatcctcagcctgctccgggcagctacctccttcagtctggtcatcgcctatcagaacatagccagcggagtggcatccaccattcatttcatgtatccgctggccgtggcactggccatgatgggctttttcggagaaaagaggtcattcgccattctgtttgccgtgttggtgtcactaagcggagctggacttttgtcatccggcaaaatagactttgaaggaggaaacacgaccatcgggctgattgctgccggcctgtccgtattcttttatggaggatatatcgtaggagtaaggaagagccgtgccgtgcagattccctccactgcattgacatgctacgtaatggggctgggagccttgttctttattataggaggatatctgaccggaggcatccggctggccaatgatacccacacatggctgaatattctcggactggcgctgccggcaacagctatatccaacatcaccctggtaaaagccattaaatacatagagcctacactgacttccattttcggggccttggaacctctgacagccgtagttatcggttgcctgatattcaatgaaagcttcacaccggccagcgccatcggcatggcgctgataataacggccgttacagtcgtggtggtacacgaaaagaaaaaggagagtgagagttgattgtccttatttcgcctttttataatccgtgatgaaaccctccatcatccacttggccaaggcctggcggttcgaactgattacaaaacggcgctggtcaaaagtgttctggatatttcccaattccacgaatacggaagcgggagaagtattggctaacacataaagattgcgtgcgctgacagttccggtaaacccacggttgggctggtgcttgtcatatttcgattcgaaagttttcttcatggtcttagccagacgcttgctgtcgggcttgcttttagagtggtaaaagaacacatcggtctgatggctcttactgcgactgtccacatgaaggaaaatggcacggcaatatttatagttcttgcgatccttcttgtaaaactcattgattttggcgcaacgttgccggagacgtgccacttggttcaagggtatgggagctcccatgcacgtctcacgtttgctgttggaaaggtacttgtcatcacggattccgtctttagcatcctggataatgatacggacttccgccccctcttgcatcaagttacgggcaaggcgcaaagccacatcatacgcatactcatcttcatgcagttctactttgccgattctgccgatagctccggggtcggggcctccatgtccgctcactacataaaaacaagcgccctgcaaacggttagatgtcacttttacactggcaagcgctttcccgaacaaaggttcattgattgtcttcttcccattgccaaccggctttgataatgggggcagtacatacttcactcccagccgcaattcctccttccctttaagaagtttcttgttcagctccaaaaactccttataataggctctccccgggcgcttgttacgttccaggaaaacagagattccttctccacgtctcggactatcccgctcttcctgagccgaagcattaaaagcaaacaaagtacaaaagaggatggtcagtaaacaaaatatgcgtttcatattccaattattcatcatttattcggttcgctacaaatttccagccgctaatttatagcattttaccatacttaagcacaaaattataattttttccctacttttgcgacaacttacgcgataatagataagaaacttttaaaacagataacattatggcaaagcaattcaagccggagacgctgtgcgtacaagccggatggactcctaaaaagggcgagccccgtgtactccccatctatcaaagtacaactttcaaatatgataccagcgaacagatggcacgcttgttcgaccttgaagacagcggctatttctatacccgcctgcagaatcctacaaacgatgcagtagccgccaagattgccgccctcgaaggtggtgtggccgctatgctgacatccagcggacaagcagccaacttctatgccattttcaatatctgccaggcaggagaccattttgtttgctcctctaccatctatggcggaacattcaacctcttcggagtgactttgaagaaattgggcatcgacgtcactttcgtcaacccagatgccagcgagaaagaaatttccgctgctttccgccccaataccaaggccctattcggcgaaaccatctccaaccctacgctcgaagtgctcgatatagagaagtttgcacgcattgcccacagccacggcgtgcccttgattgtggacaacaccttccctactcccatcaactgccgcccgtttgagtggggtgccgacatcgtagtacactctactaccaaatacatggacggacatgccaccagtgtaggtggagccattgtagacagcggtaacttcgattgggatgcacacgccgacaaattccccggactgtgcacaccggacgagtcttaccacggactgacttatacgaaagccttcggcaaaatggcttacatcaccaaggctacagcccaactgatgcgcgacctgggcagcatccagtctccacaaaacgcattcctactgaacctgggtctggaaacactgcacctgcgtatgccccaacattgcaagaatgcacaagcggtagccgagtatcttgcccagaacgataaagtggcttgggtgaattattgtggtctgccgggcgacaaatactacgagcaggcacagaagtacatgccgaacggctcttgcggcgttgtcacctttggcttgaagggcggacgggaagagtctatcaagtttatggattcactgaaactggcggccatcgtgactcatgtggccgatgcacgtacttgtgtgctgcacccagccagccatacacaccgccagttgacagacgagcaactgatggaggcaggtgtacgccccgacctgattcgcttctcggtaggtatagagaatgcagaggatattattgcggatatagaacaagcgctgaacgcctaaaggaataaacaaaagggagtgcattttcggacaatgcactcccttttcatttcaatattctctattactcaacattcaatataatcgtcaaactttccttgccttggtagaaggtctttgctttcactaccagggaaccacacttcaccggttctttccataaggttgactgggcagtaggttccgaaccatcagttgtgtaacgtacttcagcaccatcaatagccacattagcatacagatttccatcttttaccaataatcccggctgaggcaagcggaagttaatcccattctttgcccaataaggcatttcactcttgctgattttctcataataaagtgccaaagcctgattgaaagcctgctcctcccgtataccggataaattttcccatgccggatgggcattccagccacgttctgccagccctaatattttggggaaaagaagatattccacgccatcaaaactacggatagtttcggcgaacaattgcccttgtacacccataatatgcttcttgcctatctctgtcaaagcagtcttccccttttccgcattattcaaatcaatgggattgcctgccatatccacacgcagcgaacgataaatgctgaaaggaagcatagagaaagagacagactcatccacataacctccccaatcgagtccacgctcgtccggatgaccattgtaagccatatccatatagaaattgcccacgttgcaaaggatgaccgggtaaccgttattggctgtctgataaaccacttcatcagagcccggtacagtattccagcaatacacaccggcagcctggcccctcaactgttgatgagcctcttcggtatgccccaaagcaacttcctgccaaccactgaatttcagtccgttcttctgcatcacatctgccatttgcgtaatgaaatactccgacaaatcatgagctttcgtcatgcctttttccttcatcagttcctggcatttcggggagcccatccacacaccgcgaggcacttcgtcaccacccaaatgcactgtgtacagtgaaagaccagcttcctgatacatcgcattaagttcctgaatcaccttctccataaaacggtaggtagaaggcaaggcgacattcatcacattgtccgtataatattgtacagaaacataacgtgaagtatcttccggttcactcaacatatattctgtagctttccccggatcagtttcaaaatatttgttataacgtgccttcatggagacaatggcagcgcgggcatgccccggagattctatttccggaacaatgcggacatgtctttcggcagcatacttcagcaaatcaataaattcctcgcggctataatatccattgcctacagtctttgcatcagggtcatagccaccgtcataacatgggtagaggcactggctttcgtcagtggtatgtccgcgacggctacccacagcagtcagttcctccaaaccgggaatctccaaacgccaggcttcatcatcacaaaaatggaaatgcaggacattcaatttataagatgcaaaaatatccaccagtttcttcaagttctccggagcggtgaaattacgagcaatatctatcatttgtccacgatatgccaagtccgaataatcccggatggagactgcctccagcaaataaggtgtctgcttatccttcaacattgacaaaagtgtctgtgtaccattaaagatgccatgaggagtggcagcactgatttttatcaggttgtcacctatattgatagtataatattcatcatttacggcctccttcctatcaagcagttcttccagcacaatcttcacggaagcattttcgacaacttccaaaccatacaaaccagtcagtttctctttcagcaacttggcttcaccggcaaagttctccggaaatgccaaagctaccttacctcccaatacgacattatcgccttcaatggctaccactttctttacagacggaagaatgtctgactgcaccaaagcaggagcaccagccaagcgaagattggattcataaatcttagtcgcatccggatagccgctcattgactcgggagaaggaagcggcagcgccttcaaagccacgggcaacggactgccctctttaccatccacagtctccacccaataagttccttccggtacatgggagttccggtccagcttgtaagtgcaaaggaaagtgatccgcatggaatcaccgggagccagcgaagcaaattcgtctgtcggatacattttgaaaaaattaccgttcactacctctaccttcacttcagaggttccttcctgcttcacccctcggggaagctgtgaatagtaaatcgtccagttcttttttagaggtttttgagagatattcttgagaataaaggtattctcataatatccggattcgatgtcacttgcacccatttcccaggtcagagcaaccggtgccttaggttcattactcgttttacatccagcaaatagtgccattacacaaaataataatcctgccagaggaagtttcaaaattctcatgcaactcatgtgttaagttaataaatgggggtaatttctaaaatctgatgccaaaaataagcattttaagctaattaactgataaaagtaatagattttattgatagcgagctacaatttagaacttttatacctacatttgcagccaaattataaccaatttaactattctaccatggctaaaataaccaaagaagcagccttgctctaccattcgcaaggcaaaccgggtaagattgaagtagtacccaccaagccttacagtacacaaaccgatctttctctcgcctactctccgggcgttgcagaaccgtgcctcgaaattgagaaaaacccgcaagatgcatataaatatacagcaaaaggcaatctggtagctgtcatctccaacggaaccgccgtgctcggcctgggcgatattggcgccctcagcggcaaacccgtcatggagggtaaaggtctgttgttcaaaatttatgccggtatcgacgtattcgacatcgaagtaaatgaaaaagaccccgacaagttcatcgaagctgtcaaggctattgccccaacattcggaggtatcaacttggaagacatcaaagcacccgaatgtttcgaaatagaacgccgcctgaaagaggaattggacatccccgtgatgcacgacgaccagcacggcaccgccatcatctccagcgcaggattgctgaacgccctggaagtggcaggcaagaagatagaggaagtgaaaatcgtcgtaaacggtgccggggcttccgccacctcatgtaccaaactgtatgaagcgctcggcgcacgccgtgaaaatatcctaatgctggacagtaagggagtcatcaccagcgaccgcgagaatctgaccgagcagaaacgttactttgccaccgaccgtcgcgatgtacatactctggcagaagccatcaaaggcgccgatgtattcctcggactgtcaaaaggtaatgtgttgacccaggacatggttcgcagcatggcagaccatcccatcgtgtttgcccttgccaaccctactccggaaatctcttacgaagacgccatggcggcacgtccggacgtactgatgtctaccggtcgttccgactatcctaaccagattaataatgtaatcggtttcccctacatcttccgcggtgccctcgacacgcaggcaaaagccatcaacgaagcaatgaaaattgctgccgtacacgccattgccaaccttgccaagcagcccgtgcccgatgtggtgaacgaggcataccacgtaaacaacttcacttttggtcccgaatacttcatcccgaaaccggttgacccgcgcctcattaccgaagtgtcctgcgctgtggccaaagctgccatggaaagcggtgtagcccgcaaagacatcgaagactgggatgcctaccgcctgcaactgcgcgagctgatgggttacgaaagcaaactgacccgccaactctacgacaccgcccgccgcaacccgcaacgtgtggtatttgccgaaggtatccaccccaatatgctgaaagctgctgtggaagccaaggctgaaggtatctgccatcctattatattgggcaacgacgaagccatcgagaagctggcaaaagaactagaccttagccttgaaggtatcgagatagtaaatctgcgtcatccggatgaagcgccgcgccgtgaacgctatgcccgcattctatctgaaaaacgtgcccgcgaaggagccacttacgaagaagccaacgacaaaatgttcgaacgtaactacttcggtatgatgatggtggagacgggtgaagcagacgctttcatcacaggtctttacaccaaatacagcaataccatcaaggttgccaaggaagtcatcggcatccgtccggaatacaagcatttcggcaccatgcatatcctgaactccaaaaaaggtacatacttcctggccgatacgctgattaaccgtcatcccaatgccgaaacgctaatcgatattgccaagctatcggaatataccgtccgcttctttaatcatacaccggtaatggccatgttgagttactccaacttcggtgcggataaagaaggcagcccggtaagtgtacacgaagctgtggattatatgcaacaaaactatcctgaccttgccattgacggagaaatgcaggtgaatttcgccatgaaccgcgaaatgcgcgatgccaagtatccgtttacgcgcttgaaaggaaaagacgtaaacacactgattttcccgaacttgagttctgcaaactctgcttacaagctgttgcaggcgatggatacggactccgaactgattggtcctatccaaatgggattgaacaagcctatccactttaccgattttgagagctccgtgcgcgatatcgttaacatcactgcagtagcagttatcgatgctatcgtagacaaaaaaaaggctgccaaatgagacgaccgttatcaaaattccaaatagtttgcattgtgctgctttgggcagcactttgctacattgttttgatatctgtcgaacgaattgacggtccaattatcctaacgcttgccatttcggcggctttagtgtttattcccgtcataaagtctctaaaaagaggataaataatatctttttattccattttgcggtataaaacaataaaattgttgttttataccgcattttctttataaaatgtttgctcgtctcatttttatgtgtacttttgcaaccgcaatgagaggaaaaggaaacaaaccgaaaatcgaattgttttaggtaacatatagtagcaaccaataaaagaaatagattatgaatgcagctaaggtattagaagacctgaaaagacggttccccaacgaaccggagtatcatcaagcagtagaagaagttctttctacgattgaagaagagtataacaagcatccggagtttgacaaagccaatctgattgaacgtctttgcatccccgatcgcgtttaccaattccgtgttacttgggtagacgataaaggtaacgtacaaaccaacatgggctatcgtgtgcagcacaacaacgctatcggcccatataaaggcggtgttcgtttccatgcttctgtaaacctgagcatcctgaaattccttgctttcgagcagacatttaaaaactcattgacaactctgcctatgggtggcggtaaaggcggttcggacttctctccgcgcggcaagtcgaatgctgaggtcatgcgtttcgttcaggctttcatgctggagttgtggcgtcatatcggtcctgaaacagacgtacctgccggtgatatcggtgtaggtggtcgcgaagtaggtttcatgttcggtatgtataagaagctggctcatgaatttacgggtactttcaccggtaagggccgtgagttcggcggttcgctgattcgtccggaagctaccggctacggtaacatctacttcttgatggaaatgttgaagactaagggtactgacctgaaaggcaaaacttgtctgatttccggttccggtaacgtagctcaatatacggccgagaaagtattggaattgggtggcaaggtattgaccatgtctgattctgacggttatgtatacgatccggacggcattgaccgcgaaaagttggattacatcatggagctgaaaaacctctatcgtggacgtatccgcgaatatgctgaacaatatccgggtgtgaaatatgtggaaggagccaagccttggggcgaaaaggctgatatcgctttgccttctgccactcagaatgaattgaatggcgaccatgcccgtcagttgatagctaatggggtaatggcagtatccgaaggcgccaacatgccctctacaccggaagccatcaaagtattccaggatgcaaagattctgtatgctccgggtaaggcagccaatgctggcggtgtatcagtatctggtctcgaaatgactcagaactccatcaagttgagctggagtgcagaggaagtggacgagaaactgaagagcatcatgaagaacattcacgaagcttgcgtgcaatatggtacggaagccgacggttatgtaaattacgtgaagggtgccaatgtggccggatttatgaaggtggcaaaggctatgatggcacaagggcttctgtaaggactaaagccatagttattatgaagaaaggcgaagggagttgcaaacctcttcgcctttcttcataatagtaacctagtcagcaggagctaacatattaagaatttccttgtccttccccccgttttttattcggtttcggactcatccataattctaacaaccctccattagcaaacacatcgtgagaaaaccggaatacatcatgatttttcacataattaaaactttagtacccccttaatcggatagtgatcagaaataaaagattttcccgcatatttttctcgaattgtaatgtattccgtacacattttaaaccctttataataaatataatctataatagaactacgggtcccccaaccattgaaagtaccaaaagaatccgtttttttagcagagcttctagcatctgtcattttttcattcagttcttgtatggaaggatccatgttatccatattaaagtctccagtcaaaattaatggaaaattatcaagattaatcttttgtatcttttctaagatgagtttcaaaccttcctttcgtgccactttgccgacatggtccaaatgagtattaacgtaataaaacttctcctttgtttttttatcctttaaaagcgcccatgtagcagtacgggtacatgcagcatcccatcctatagaaggaatgtcaggagttgaagaaagccaaaaatttccccactccaacaattctatttttctcttattatacattattgaagcatgctctccgccatgtttaccatcaatgcgtccgacacctacagcctcatagttcgtgcaattttcaagaataaacgccagctgaaaatccaaagcttcctgaactcccaaaatatcgggcttatgctttttaatcatttttatagtagctggctttctgaattcccacgcattaacaccatcctctgccgtaccgtaccgcatattataagaaataacagtaagttgtgaactattgtttcccctttttgcagaaacgaactgaggtaacataagggtaattaccataaaaataaaaaagaactgtttcatattgatatctataaaagagatgagagtgtacaaaccccaaaccaagcaatgtgcttatcaaggggccaatacactctcatccaggttattactaattacgtgctatagttgtgacttctttaattgtcgtatagttataacgattagtaccgctaaaactttttgtagtacgagcacctacacgcaaaaagaatttacgcgaataatcagggaattgtccttttgtcttaatagtaatttctttacctaaaacatcggttaaagctgcccctaacaactgagtagaaaaacgcggactaaagctgaaatctccgacataactcgtttcgctcacaaatagccaagcttcggtaagcggttgttggtaatccggattatttgtaccacgagtaattataaccttcacctccacagtaccatctgcattgacctgaggttcgcctacccatttcacgcgcaacagcggctcaatctcataagttttctctacagtaccttttatatcaataatctcttcatccaatggtacaaaagcaccttcaggaataataccataattgcctgcaaatattttggtattctggaaagtaccatcctgcatacaattaaaatcataaggttccggagtatcactccagctatactccatcatacggatacgaatgccggtattaccaatagctgtttggaaaggttctttagtttccttatcaataaaagcaccacggaaagtttcttcaggttctccataattatccacatcgcaagaggtaaaatttaccaataagcataaggacaacaaaatatatgttaactttttcataattgaatgtttcgtttcttataattaataacctggattttgtttacaattcggattcttggtgatttcaccagtcggaatctgctgataataattacgtgtatcataagtataagtatatccatattcctgctccttgatatccatgaaatacttcatggcatctgctgcaaagaatggctgcaaagtgcgatatctgcgtgtagactgttcatcatcaataatacgccaacgcttcaaatcccaataagttttattttcgaaagcaagctctttacgacgctctatacgcactacatcaattgaagtttctgcagaagaagcaagcaacgtagcaccagcacgttcacgaatgagattcacacagcggaaagcctcctctacataattcttaccggcatcatcggtaacactacccacagctgcaagttccatagccgcctcggcacgattgagcaatacttctgcataacggatgtcaatccaatctgtaacagactgattccaagttgtattcttctgttcaggattcaaatacttacgaataaggaaaccggaaaccgtacagcctatctcctgattcttcactgtaccacttttccctgcacgcttcatcattgtaccatcctttaacagaattgcattagcatccgtattttgcgattcgcgactggccaatttcagcaagctcgtcgcatcgttagcgtaagcactataatcatcataaaagccataggtatcttctgaaggaagaagaggagaaattttatcaccttctccaacccaaataccacgacggatttcaatggattcacccttaaactcgtcacccggcagcaatacagtagcacgcaaacgaggttcggcattcttgaaaggttccattgttgtttcatacaatttataataaccttccgtgttcatgttggcaaaatgcccatcggcatctttctcaaaaccttcaaacatttctacaaaatccaatgtaggacaaatttctgtgttgctaccaccggtagaggtttgcgtaggctgtgcaaaacaatcatatgaatgtacacagtccggataatcaaaatatttcacgaaaatattctcttccgtatctttcaagaaaatattcacgaaattagtatattgtgcatccttattattagctgcccagtcccctttgtaaagagcataacctccttcatcaacaatcttcgatgcttcataagcctgtttaaaataatcggcagcacgatttgctggaattccgcaaatacgcgcatcattataaacttcattcacatcattatatttggcaatacttccagcataaagcatagcacgcgatttaaaagctgcagctgcatatttattggcacgtcctttttggttctttgcagacaaatgcgcaatagcgtagtccaaatcactggaaataaaatcccagacagcctcttccgaatcacggaacaattgtgcttcaggaatgcttactgtagccggataatcaattactgtgttaacaataggcacaccaccataacgcttaactaatgcaaaataagtataagcacgaatgaaatacgcttcgcccaacaaactttcaatttcagtagcagaatgtgaatcagcatatttgggaagtgtttctataaaatagttcgtttcacgtattaaggcatacgcagcatcccaatagtttgctgtttcaacttctgcccccttcgtgtcacggctaatagcttcaccagtcaaacaagaaggttgcgcaaaattagaacctcccgaaaagaacatgtttacatgcgaatagcggaaatcttctacaggcaacgtactatacaaacgggccatatagcttgtaacccccgccgtacttccaaaaatatcattatcaccaacaatattcattggtgggatgtccagatctacacaagaagtcaatgaccccatgcataatgcaaatgcgaagatatattttttaattttcatgttgatattcatttaaaatttaagatttgctccaatagtaactgttttatttaaaggatagttatatccataatttcctgacgggaattcaggatcacaatatttcaatccggtaatggtaaacaagttataaccgcttaaataaacacgcagcccttgtacaccaattttagtcaaccatgatttaggaagactatatcccacttcaattgttttcaaacgcagataagcagcattttgcatattgaattctgaattccggttcggcagtgaaccagtgtaagcataatgaccgctaatccatttagttgccggatcgtaaggatctgcatgactatcagcaggacgccaacgatccataaattgatccaaagcatttgtattagcccacaatggattgtaaagcaactcatcataagagatatgacgtttggcagctccttgcaacaacagacttacatcaaaacctttccaacttgcattaaacgtcaaaccaaaatttatcaaaggacggtctcccgtgttcgtcaaaggatgttcgtccaattcattaatccaaccatcaccgttccaatcctcatagttataatcaccgagtacagaaccacgtcctatataaatagaattgtaataaatttgatcccatgaagtaaaacgttcgccggccccatatccccaccaaagatctgtaaaacgatcgtttgaattttgtttccaattcaaataagaattacctttccgcgcaccttccacatgtttattttctgaacgggcatacgcaaaatttccttttatctcataactgaactcattgatggtattgcggtggcttatttctatttcatatccacgggtcatatctccattcagattctcttgtggcaatgcggctcccactactcccggaagactcgctgcccgagtggtcagtaatccatcacgatcacgtcggaaataatcaacagtcaatcccaataggccatcccatgcttccaaatcaaaacctatatcaaaagttttagcttcaatccatgagatgctttgattagccaatccctttgttgcagaagcattgacaaatgagccatcaaaaatggcaccacccggcatcgcatatgctgccccacctaccggatacgtataaccattaaggaactgatacgctaaagcaccatcgtcacccatcttaccccaagaagcacgtattttaaggttattaatgaaattcaaagaagattctttccaaaacttttcttcagagacacgccatccccctgacactgaaggaaacatagcccaacgtgaatttgcagggaattttgaagaaccttcataacggaaagcaaattcaataagatatttggacttataatcgtaagctacacgccctaccaatgcttgattggcattatcaaacaaggcagaagcagcagtactctgtccaaattgctggttatcagcatttccggcaaaaacttgatctataggaatagaaagttcctttttaccattaaagttatcccccttataagtcgattcctcaaatagcagcatcgcatcaatattatgcccattaaactcacgagagtaattagcttgtacttgccataaagtattatcttttgaatagaatgtacgacctactttaggaggatcattacgtgtccatacctgattatctcgatatgatttccaagtattttcaaactccttattatcattcattatataatcgtaactatataacccctttagtttcaatccttctacccaaggtacatcataactcaatgaaaaacttgactgaaaccatttgctcttataagttttatatcctacaacatccttatccatcatcgccaccggattcatcaaagtagagtttgaaggctgggtaaaaccgccattctcctgataaatgggatccatcggctgcatcaaccaaagaccacgaataatatcataagcaccataatgcggtgtattacgctcatccatcaaacctgaaagattaacatccaatttcagattcttagtaatattggcagaaagattactacgcattgtccatttatcgtaattcatatcatctgtctgcaagaaactttgttgcgcttgatagccaacactcgcataataatttacacgttccgtcccacctgaaatattgatggaatgttgtgtctgaggcgcagaaccacgtaatactgctgatttccaatctgtagtctgtgcagcggctatttcttcatcagaataagaagctcctccaccatctacattatgacgtcccttttcattagccaatgtcatccattcttgtgaagtaaccaaatctgggaaattggaaggcatttgccaagtaaagctacccgaataattaatttccggtttcccttgcgcaccttttttggtggtaataagaattacgccattggcagcacgtacaccatagatagaagcagaggcatccttcaaaacagaaatactctcaacatcttccggatcaacgcgtgccatattatcgcgaggaataccatcaattatcaccagtggattccccagtccacgaatatccatcgatgtattgaaagctcccggctcacttgaattttgaaccacacgtaaaccggcaatcttaccagtcagcatattctgtaaactttcattttttgtagaaacaatgtccttcgtgtttacggcagacacagcaccggtcaatgtctgtttctttttcactccatagcctaccactaccagttcatcaatcaaaacattgtcactttgaaggatgacattataaaccttctgttctgccttgatggcaatcgtctgtgacttatatccaataaaacttactttaatcgacgaatttggcgtcacctctaaagaaaagtttccatcaacgtccgtcacacatccattttttgtcttggtatcaatgacagtcgcgccaatcaccagctcaccggtgttgtcctttactgtacccgataccttaaaagagttcccttgtgcatacaacgtcactgtcatgaacgacaccattgcacacaaccaaacctttaaaagattctgtaccactaactttttcatacttattaaatttaaaattgcaatttgatgattattctattattactttcaacatgatatattcataaggcttcatccaaaacatctcgtcattaaaaggtcttaaggccttctgacgataatcacatacacttacttcacgcggccttatactaccccaaacaaatgatgaacaaacactctgcttacccatattgtgcaggcagacaatatacccctttccatcgtcagcaggtttgatactggataatgcaatacgatggcgtcctttcaaccgaaacaactgctctatattctgagaagaacgactggctacagccaccaattccatctcacgttcagctcctcgctgtttcaatttcaggtcaagcggattacaaggctgcaaagaatagcgaaacttcgctgtgcctccttgtgatgctttataattagtcctccatgtattcgtcattacccatgaatagacaatcggcgatatcttggcagactgccaccagccatatccatgacggggattcaggcgataatcaagccctgagggcgaacccagttcaacaaaaggcgcatcaacggtggtcaggcagactgcatgctccaaatctcccacagccaatccgttttgcaatgaataataatgtttgtttactccctccagttgctcacgctcaggatgaatttcactcatggcaagatccattgtaatttcaggttgctgaatattgaatggaaaaacaaaacgcacattttcaaaatctaaaatatcctgcttatccaacgtattacaaatatctaccctatctatccctttgtaaactgtcacatcacgccataaagtattacatcctggagctttagactctatacgcagtgtagcagcaaccgctccatcatccaacactcttatatttaatatctgttcgattccctgtgggtcagaagcatatcttccagtatataaataatcattcaaaccgctattcgaagcatattcataagagtcaccaactcttttgaaagaactaattgtacctttcacctcatcaatttcaacgcgtacaattccattatttaatattttattctctgcaatcatggaaacgaaacgtcttgaactctttttcttcgagacgatttgatatacctcagaagaaagtgctggtatattttcagcaacaaaagcccaacggccatcatacagacgctgtgtctctactttttcaccagtcctggttatcaattctttttcattcaaattgaccattgaatccaaaaacactacatccgtacgattccaaagatttgtattcagcacatgtacaaaatccccacctttgtcgacatgcaatgggcttaaagcctgtttatataatatttgagactgattacttgcattatcagcataagcttttttcccttcccacaaatcttttgtaaatttagaatgcgggtcagttccactagcagaagccccccaagtgtgctcagaaaacagtatcacatttttccatgcttctttaaaagctttatctgggaaagcgtctgttttatgaagcatactccaaatagtttcagtctgtgccaagcgtgcagcagtagtacgattcattgctgtctcacaagcagtagaagccgctccgtcttcccaagtgggagtcatgtcaccagcaaagacgggtaattcagcgccatattgttcttcgaatttcataaagaactcacgggcagttgatatacggaattgaggaaactcataacgttcattccactcacggattacatcagacattgattgatcgggagggccgttatcaccatgaactgtataacgtaaataacaagtttgatatggaaactcctcagtttctaattctgttaaatagtcccagattggctcaagtccacaaactccgatacggttagccaaccagccatgaaaccatgagtaaccgcgccctgcctgccatacaagtactttatcagtacctgattgagattgccaataaaaaggtctatcaccccatctgacatgtaaagcagcagcacggtcatttcctatcctcccataaaaaggtacataatttggtccgggtgaataatatttcactccattcttagccattgcagtgaccaatccccaagcttgcccaggcacatcactcatcattgcagtattcagctctactcccacttcatcactaatccaatgtgcatcatcaaaaatatgcatcaattcttcttgtcggctaatcccagtcaaaatacttcccaaagacatatcaacattaataataccatcgcgaatggcctgcttcaaacgttcagccttttcagttgctgcatattttttcaaatatgcagcaactgcccatgtagcctccgtattccaacagtaacgtgaaccttccggatattctttagtacgctcagctaaatcgagtgcgcgttccaaattacgccattgaagtttcatcacatcatcctggcgatgtgtatatccgatatccaaatgagaatgcggaaaaaagcaaacagtccactttcttgctcctggcacttcatatttacgtttcacacaaccttgacggctattcacctttatctccaaagaagaggtctcttccatatatccagcagggaaatatcctttgtactcatccaccccagtctttgaagcctctatttcagcattccatattttatcacctaattgacacgttaaggtagccccagcatacaatggagtattaaaacgtaataagaattctcgtttaggaccttcagcactctttagatagccttgcccagccacaaaagaaatatcatcaagctttcccaatgattgtactgaaaccactgtttttttataaaaacgaatttcgctcaaaccatagtaatccacattctgatgcatatcagcagcttcctgtatcacaaccggattcttacgatcataatgattaccttctccatccaacgcagccgtaaagcatatataacgtgcttttatacctttagtatccaaagaaaaatccacggatccaggattacgtcctaccgattcaggaattaaataatattccaaatcaccattctttagtaattgccatttattcccatcctctgagtactctatatataccttattgagtccacgccgagtatgctcattctgattatagttccatatctgaatcaaatctacttcaggacattttctacttttaccaaaatcacacaaaaaccagacaactccttcatgagtagacttattgtaacgaactggctttttagaaacttcagacaaccacatgccatgtcccaggttattagccacatgatagcacccctgcattccatctccattaactacggaacaaatagttcctttattcaattcgctgctggcagatactttaattaagctctcatccaactgtttatacacaacaatacgttgtgcatatccggtaatgaacatcattaataacaaaataacggtaatgatttttttcattccacaaaatattagtttttaataaaactgctaaacatataaagtagtctcaacaaaaacaaacctcattatatgtatgaacatatagatgcagcaaatatatataataaattcaaaaagcaaaagtaaaacaaagttttttttataaaaaaatgagatgtaataaattaaaagtcaaactaaacttaaattaatttatcactaaattatttataaaagaatacgtattaaaacttaaacgactaataattaactaattattcttaaaaacatctttaactacaatattaaaaaacaaacatttcaaagaataacatcccagcaaagcccgtatttatcaaaatgattacacaacacacctcaatgttcatacattaattataaggtataaaattatattttcattaaatcatcataccaaagaaaccatacaacacaaaaaagcgtcttcgttttcgaagacgcttaaaaaataaaaatgatgatgtattaatagtatcaaaaaacgaatcactttacacaagaagttacttttataccaaaagcgcaatacgttagatataatacgcaggccaacgtcaccacaacaccaccgataatacctacagtaccgatggcaaaaccgacaactagagttaccactccccccccggcaacagctgtaatcattagaccggaaatctgatttgccttctccggacacgcctgcaaagccattgaataaataatagagaaaactgatgaagcaaaaaagcctactgcaccaatacaaactatattcaccacatccttttccactcctattaaaactagcagcgaaacaacacaagctacaatatttatacgaaagtacctcatttctgcaatacgggtcaataagaacgcccctaacaaagcgccaatcgtacgactgaggaaatagacttgaggagcaaattttacttgctcatcagaccatccaaaacggatagacataagtttcgaactaataaagtttgtcgccacatccacgcctacaataaagaaaattcctaaaaacagtaatagaatagtccggtctttcagcaaagcaaacgtattcctcatggaaagatcactgttcgacacaacatttctttcccgttcaataggggttgcaatcagccaaactgtcgacaataaagtgatgaagccaagaatggggaagcaataataccatttatccatcccccaataatggacagccagcaatacaatctccggaccgactaaagaagaagccgcttttattacctgcccaactgtcaaactacttgtcaggaaagctttgttagttataacattattaagcaacggatttaaagaaacttgtaaaatagcatttcctatacccaacaaggcataagccaccatgcaagttacaccatcatacgccaataatggcagaatcatacctacaattgtaatcaccatactaacaagtacggtattcttacgtccccatttattcatccgattacctatcggaattcctaaaaacaagaaccaaacaaacaccattgaaggtacaaacccggtcatcataggtgaccagttaaaactacgctgaacatagtctgatgaaataccgacaatatcacagaagcccatcacaaagaaaccgaaaagtaccggaaaggctgtcattatagagttttgttttttcattttcatggatttttatataaaatgtctattctgtcactcccacgtctttacgcagtttttccaattgaacagtcagtgcttcccgtacttttacatacttcgggttatcatatacattattgacctccatcacatcttttttcaaatcatacaattcccaaaagtcaatagcttcatcattcccactaccctctccatgccaatgaatcaatttgtagcgtttagtgcgaatgccatcatgtttgcgtacactacccactgccggataatcgtaaaaatgatagtataactcatttcgccaattttccgcctttccatttttaaacaacggtaataaagagcgcccagacatctctttcggcacctccactcctgcaaggctcaggaaagtcggtgccaaatcaatattctgcaccagctctttgcataccgaatgtttcttgactaaagaagggcacgaaataatcagaggtgtacggaaagactcctcatacataaagcgcttgtcatacagtccatgctctcccaacagaaaaccttgatcagaggtataaactatcactgtattatccagaactcctttttcttccaaataatcaagcaaacggcccacttgttcatctaccgaacggatagtccgacaatactcttttacataccgttgatatttccaccgaagcaaatcctttccaaccggaggatttttcaggaattcttcatttttcttgtcataaatagcttcccatgtagcacgctgttcgctatccatctcagccattgccatcagccaactgtctctaatatattgcaatgtaggttcgttcttcaattctctcaccttaaaatcgaacgcatatcccatgtgccgatcaattgtcagctcctgagttttcatctgcggaccacgtgtcgtatagtcatcaaatagcgtttcaggttccggaaaatccacatcctcaaataaatgcatattgggaaagtcaggcatccaattacgatgaggtgccttgtgatttacaaggacacagaaaggcttctcatcggagatgtttttctccaaccactctatggcatgatcggttatcaacgtggtagcatatcctttttcttttatatattctccgtttgtatcaggacgacggaacttgggattatagtattcaccctgatcaaaaagaatgtcataatggtcaaaccccttcggctcaacattcaaatgccactttccaaagactgaagttacatatccttttttttgtagcagctcagtaaaccattgtttctgtggattcaaacagcaccccaacctcgtctgtccgtgctgatgactatacaagcccgttaaaagggtcgcccggcttggagctgaaatggaattctctacaaaagattgcgtaaaaagcatgccattcccagccaaacgatcaatgttaggtgtcggagccaactttgaaataggatgtccgtaagcacttatggtctggaaagcatggtcatccgtaaaaatacaaacaatattcaacggtttattggacactttctgggcccaaataggttgtactgccgatattatcggcagtacaaccatagaagtggaaaacagattatttttcataacatatttctcagtgagtcaattcctcattaggtgaagctcccaaacctaaaaccaattttcctccttttacgacctcactaaagggcaattgtacagtatcttgcggacggttgttcaaagatatatcctgcaaataacaatcacctaccgcctgcttcttagcttcgattacaaatttctctcccggataataatctttattcaaacggacagtgattttgtcaaacaaaggggcacctatctggaatttcggatcaatctccgtcaatccctttacatcaaataagcccaatgcagacattacgtaccaagcccccaattgtccttgatcctcatcctgtccataaccatagccatgtataccttcgaggccatagaactcatccaaaatagcacgtacccacttttgagacagatatggtttacccgaaaagttaaacaaccaagaaatatgcaaattaggctgattaccatgattatacaccgtcttcaatccggcaaacgcatccacttctttcccacctccaaaaatatttttctgtgaaagcaaaaagatactatccagacgattattaaacgtttcttgccctaccaaatctaccaattcgtctatctggtgagggacataaaatgtatattgcacggcatttccttcttgaaatcccttccaaggagccaatggattaaaatcttccagaaaatttcctttagtatccttgggacgaatcaaacgggtctccggatcataaagattcttccagccattcgacaaattagagagtaacttatagtcatcctctttacccaaatgtttggcaaattgggacacagcaaaactactgaaactgtattccattgtatgtgaagcaccaaacccagatccttcctcacgagtcaccatatcaaaccgtttttcataaggagaatatccacgttccacaaactgacgtacatccatcttacctgcaccttcaagtcttccacgccattccacttcattcttcaaagcagcttcatatccctgctttacgtcaaaatcacgaataccgcaattatatgcagcagcaatagccaagctagtaaaattcgtccctactccagacacatatttactgcatgcgattccatcacccaaccaaccggtatcctgataaaccaacaactgactttttatccaatcagaataatattcgggataagccaatgaccataattgcgtcagattccagaaaccaccccaaatggcatccgtattataatgctgatgtaccggattaccttcttcatcaagagcaatacgaccgaccgttccattatttttaggataatatccatttgcatcactagccaatccacgtcccaaaagcgcatggaacaatccggtgtaaaacttcactttatcagtttccttccctccttccacataaatcctgctcagagattcattccacacatctgttgcattcttcttggcttggtcaaaggtaacatccgcagcctcggtttcccggttgaaacgagcattctctatggaagtataggataggcccactttgacttccacagcctcttgttcttctgtagagaatgtcatgtaaagacccgcgcctggtcctttttcctgatgtttacccggattaaccacatcttttacaaaagtacctacctgaaccggcttcttattaagaacagccgagaaatacatacgtacatccgcccctttctgataaatattaacatatacgggggaagtgattacataaccttccacccggccatcttcaaaatattgtacttcggcatctttcacctcaccactttctccttgcttgttacctatatcgaagataaggtttgcctgttctgttttgggataggtataacgatgaaatcccactcgtttcatagcagtcaattcagcctttactccatagtccttcaacaaaacagaatagtacccgggagctgccacttcatctttcttatcgaaacgtgaacgataaccgccatccggattttccaactcacccggtactgtctgcaattctccgacagtcggtgcaaatacgacaccgcctacctggaactcgtgaaaattggcaaagccttcgatggaagtatgacgaaaatcataccccactgcttgccaaccaccgggatttcccaaatgcgcatcggtagaaggagccagttttgccatgccaaacggaatagcagccggtgtataaaagaaccaacgacaatgcgcagttccaatgtttgggtctacatagtccaccaaagctttagtgcttgaagtacttgttgaacaccccataatgatactcatacatatcaccaaaaaacaaagtcgtttcatgatattaatttattaagacggtagacactaacattatttattttccgagcatggagcaatcccccatgacttattcggtttatcacccatttccagtatcaattctccaccttttagcaattctgcagcggggaaatagaaacgttccaacttctcaccattcagagtggcactctgaacatacttattttttctggatacatttttagcctcaattgtaaatgtttcaccacgattatagcgtttgcccaaatcaataaccactttctcatacaatggactggcaatttcataaataggttcgacactgcaaccgccatcagtctgaaacagtcccaaagccgccatcacaaaccaagcactcatctggccctgatcttcgtcacccaaataggcattggcaacgccacaaccataatatctatcaataatggaacgggaccatttttgtgtcagccaaggtttattggcccaattgaacaagaaagcaaaatgcatggactgctggttgccctgaaccaccggataatcccaatattggtcattgggagcattgtatctccaaggttcacttacttcaaaaccccagttcagacgatccacaaatgatttttctcccattatgtcaatcaaggccggtacatcctgaggcacaaagtagctaagctgccaagaattaccttctacatagtggtgattacgtccggtttgaaatgcatcaaaatcagggataaagttaccgaccgaatcacgcatgtgagcatatccattttccggattaatagcatttttccaccaatatccgcgatcattgaatgtagcatattccgagaatttacctaatgctttcgccatctgtcccacagtccaatcatcgtaagaatactccaatgtattagaaaaacgtcccaattcaataggtacgtatttatatttcatataagacaccaaatcgcgattaccggcaaaaccacctgcaacatgtgtagctggagtagtctgcatttttttcatggcttcaaatgccttttccacatcataatcacgaatacccatctgataggtagataccatctgtggaatttcgtgttcggccaccattaccggaatatattccattccggcaggaccttttgccaaccacccgtttgcatcgtacaatgccaactgagagttcacccatttggagctccattcgggtgtcactaaattccagaactgattcaaattccagaaagtgttccaaaaagcatcacatcctaaagctacatgttcaggatttgtaaatttacgtaccttttcgtccggagacacccattcgccattcacatcactccacaaatttcggcaaagtgcacgatacatattagtgtaaaagcgcaccttctccagacggtcataggtagttatatccagacggttgaaaataccattccatacatctttctgattttgcactaccgcatcaaaatcccaaccaaatctatcagagatttccttttgcagattttcagaagcatttgaaatactcaccaacgaaataccggcacgagcctgcaccaccggatgctttttcgtatcaaattcgacataaagtcctgcatctttcaagttcttacccaatatatggcctccatccaatatttgcttattcttccagccacctactttcttaatcggtgcatcaaactctattacgaagttcactacatattcctgatcagcgtcattactccacacataaggacgaggagaaatctgatgagagcgtccctcaattctataatcacttaccttcttaatatctacatccagcagattataatcatattcagcttgcacatgaaggtcaatcattacacgtccatctttatctttcgggaaggtatatttctggaaacttgctctttctgtagctgtcacctccgcccagatttctgtatcggtcaagaagaccttataatatcctaacggagcttcttctgtcctcttgtcaatacgcgaacggtaaccttcatctggacggaactgatcgccaacctgagtaaacaacttgccgttagtaggcattaaccctaatccgcccattgtccactcatggatatgactgaaacaacccaaagtttcaaaagttggttgataaccggcctgccagcccatattttgattgtccggactcagcttcaccatactgaaaggcatccaaggtcccggtgcaatcatccatcgagaatgtgccgtacctattttggtatctacatagtcggcaaatgtctgtatcttttgcggagaacgtataataatacccttttccagcaattgtccatctacaaacacttgatattcactctttctactttttttcacagcaggcataggtacttcaaatacataacgtgccgtgtccaactgcgcagaaaaaacatctataccgtctaattttacactcaatttcgggttaccggatagatgctctacatcaaccaataaaggctgtatttttgctccatccatttccatttcatattctgccggagccacattgcgcaagaaagcatattcattattcttttccagaacaagttcgtcagcaccttccaaacgtatctgatcgaaaacaatccagcccccttcaagaacagaaacagtgaccatatttccaccttttttcaaatcatcggctgaaattggaaattcaagaatttgttccttggcatcttgaagattaccctccagtactcctttcgaatgccctttaatttcaaacttcttttcggcagaattcaccataactttaaccaccgaacggctcggattggcatccaccaagtctaccaccaatttccatttgccatgtttcggcaattttttaatgccaaacaatatatttgcatcatgagttctccaaccggaagtactccatgtacctccccaagtatcatcaggccctggcaacacataagggaaatcatttttgtcaacagaagtccccactaaaaagtaacgatcttcataaccaaaatcatgagccaggaactttttatactcagaagggcccaaagccagttctgttccggaattatccgcaacgccaatttgccataccacttttgcagcagttgcacacatagcgcaacaagcaacgataaaaaaagatattatttttttcatattcataatgagtcttattattttttgttatccgtgaaaacaatcttatctacttaaaaagcaaactaacccttatatcttcttgtctatctgttgtaaagcaaaagcatatgctcccagtgcaatagccttgtttgctcccaaagttgaaatcgccacccctatacgtttagtacaatcataggatactttcttgtcagtaaaaggtacctcaacccaagaacttgtatcttctaaaaacttcttatattcgtccggctccatcaaattacaaacttccatctgcagacaatcgaaatcccgtccggagaaagtcgatatggaacgacgcatttcacgcatcatacctggcagaatatatttagctgcaccggcaactcctcctcctataaccaccatcccatctacaatatgaagtgcactgacaatggcagcacccgccatttcacctaattcatcaaaactccgcacagccgcttcacgattccccgtgagtatgccctcggcaatgtcatatatatcctttggagtcagattatcaaccgcctcaccgctcagttctccgtacacacggcgtactgcacggatactgacactttcttcggctatcaagtcggtatattttttattcctcataatccagacatcaccaccacagccgttatcaccggccagcaaacaattatcaatcaccactcccgctccaaaaccggttcccaacgtaatgcctaacaagtttttataacgtttaggattaccggcagccttaagttcctcattaatggaaggtaatattccggccaacgcttcaccgtaagcaaacaagttaccatcgttatttatatataccggaataccaaattcttcttccagaaaagctcccaaagccacacctccacgaaaaaccggaaagttcggtaaatcgcctatcacaccattcttatagtctgctggaccaggaaatgcaaaactgatagctaccggctcattttccaattgtcttttcactgcagaaaagccttttttcaaaacagtcagacatccattcaaattgtccgaaaccgctggcaaacaaatagtttccacaatattctgatttccccggatagctgaaaaaacgaaattcgtgcctcctgcatccaaggtcattactgtacgttggtcatgtctatacatattatatcagatttaattaataccattttccggttaaaacctcacataagccttgatggttccacactcttttcccacagacttgccacaaggagttattgtatattcacccacacttgccggaactatgaaggtttcagcataatgtaccacaaatggtttaaaagcgtttgtcggactttcaacaaccacttcttcaccttccaccaaattcagtacattcacactattattcgtatgatgtgtaacagatttggagaaccagtgacggcgtgtttcaatgaattcattcgggtgtaatccagtacgctcctcgctccatccttctccttcggcaatctgagtgaaatgatttgccagatattcttttacatattccgtattacgtttccagtctattacttctttacctctttccacattaatggggcgcggtttgccatccaaccccaaacgttgccaatcccagagtttgaatgtaaacaaattgggtgttgagctgatttccaatacaagtgcctccgaacctgagcaatgcaccgtacctcccggaatcaaataatgatcatgttttttagcaggcagtttatttacatacttttctgtatcgaaaacgatttcacctttctgagcctcacgcaaatcacgaatcatgtcatctttattaataccattcttcaaaccaagatagaccgaagctccttctttagcatccagcagataatagctttcgtcctgagtataatacataccaaagttttcacggataaactgtgtggtaggatgcacttgtacactcaaatttccaccacctaccgtatctagaaaatcgaaacgaatcgggaaatccttaccaaaacgcgcttctaccggttcacctaaaagctctctagatttcaacaaaaccaaatctaccgacggcaattcaaaacgtacaccgttcacctcaaaataaagactattctcttcgggcacacaatcgaaacaccaaccataattttctttttcaggatttaatccacacacttctttcatccattgtccgccccatggtgccgggtcaaagaaaggcactacgcgaaaaggagtcttaattgtttcttctattcctttaaagaaagtctccctatcaatcattctcggatcgtttgcaatgtgcgtatccaaccagaaatcggctttatcaaacaagccttccttatacttatcaagaactctccaatcattaaaataccctctcttatattgtaaagacacagcatcttcacgattatccactcccaaagcctttacttcgtgagcacgaaaacgctgttgtatctcccaacgggccatatcaacatacaccagcgttgcttctgcctgagctatcatagcagcacccgaaccgaccacaatcactctatcatttgccgctacctgcttccgggctacctccagcttacctgcatcaaagtagtctttcagagataggttcgtcacataaccaaaaagaacatcctttgtcataaaacgttctgtcatttccttaatctcattctccggcttcatcaagtcacgtgtattaataagtaaggtaggtgacagcgatttcaattcatttataacttcatcttcacgcactcctgcatagagttcaacagccagtacctttctactcttaaagcactccatcagtaaggtatgaatatcattccatccccgaagaatcgttcccgaaatctttgtagaagggaacttgtcgtaatttacttttctcataattatatatacttgattttattatatgtatgaacatactggtattttgtgcaaatatatactctttaaaaataaaataaaagaatcttctcatatttttttgataaaaaaagaattatctttgcaatattaaaaaaataacagaaaaagtataaccatgaaattagacccaaactcagaaaaacctcttcacattcaagcagaagaagtgctgagaaaacttatagaatcagaggaatacaaaaatgggaaacttcttcccaatgaggttttattgtctgaacaattaaacatatcgagaaatacacttcgccaagcaatcaacaaactggtattcgagggattattggtcagaaaaaaagggcatggtacaaaggctgtaaaaaaaggtattataggaggagtaaagaactggttgagcttctcacaagaaatgaaaatgctaggtatcgaaattaaaaacttcgaattgcatgtcagttttaagaaagcatccgaagaaatatgtacctttttcaatatagaccctgaaaagggaacaaaatgtatggtattggaaagagtacgcggtaataaagaatacccttttgtctccttcatctcttatttcaatccgagtataccactgaccggtgatgaggacttcacccaacctctttatggaatacttgaaaataaatatgacatcatcgtaaaaaccagtaaagaggaagtatccgcacggttggccggagaatatatcgcagaaaaactggacatcaaatccagcgaccctatattaataaggaaaagatttgtttatgatatcaatggaactcccattgaatacaatataggatactatcgtgcagacagctttacctacaccatagaggcagaaagataaatatacaagaaagtttaatctataacagaaatgactatgaatacaacagaaatccccgtactgctgttgaccggttatctgggtagtggcaaaacgacgttggtaaatcacatcctttctaataaacgtggcattaagtttgccgttatcgtcaatgacataggcgaggtgaacattgatgcagaccttatacagaaaggtggcgtggtgggaaagaaagaggaaagtctggtagctctacagaatggttgtatctgctgtacgctgaagacagacttgatagagcagatgttcgaaatcatgaagatgcaacgcttcgactacatagtgattgaggcgagtggcatctgtgaaccggagcctattgcccaaacactctgctccattcctcatatgggaggagcgtatactaaatacggtatttgccgcttagactgcattaccaccgtggtggacgccttacgtctgcaaagtgaattttcttgcggagatgatttgacacgcaaaggcattgatgaagaagatatagaaaacctcatcattcagcagattgagttctgcaatattatcctgctgaacaaagcagcagaagtacagcccgaagaattaaaacgtatcaagcagattatccgcaccttgcaacccggtgccgaaattatagagtgcaactatgcagatgtagacctggataagattatccatacccacctctttaactttgagcgtgccgcaacttctgccggatggattcgtggcatagagcaacaagtaagcgaagaggaggaaaaagaggcgcattaccatcatgaagagggtcatcatcaccatcacgaagatgaacatcatcatgaaagcgaacatcatcacgagaaatgtcatcaccaccatcacgaaggaggtgaagtagaagaatacggtattggcacatttgtctactaccgccgtcctgcattcgacattcataagttcgaccactatgtcgctaccaaatggccccgcagcgttatccgcgccaagggtgtctgctacttcagccacaaccgcgacatgtccttcctctttgaacaagcaggtatacagaagaaaataactgaagccggacaatggtatgccaccgctcccgaagaagacatgatagaactgatgcgccaagaaccgggattgctaagagactgggacgaacaatacggcgaccgcatgctgaagatagtattcatcggacaaaatatggataaagagcaaatcatccgcgacttggacaaatgccttgaataacttcctaaaaaagtgctccccgtcattccgatcttaagaacaacggggagcatcgtcccacgcgcgtaactctattttaagaatcaggaaccatatcaattctccgtaaaacggaacattttgaaatacaccttctgctctgtgtcggatacattcaccaacctcatcttcgcaacactcaactccttgagagatgccttcacctgcgttctgtatcccggtttcaaatccaccgcctgccagtttgtgccatccgaagttacttccagtttaaacttcgaatcagtaacctccgcatctcccaaatcgataagcaccgaactcaactggcgggcataatccatcgaaatggtcagcacaccgcctgcctgccagttgatgacttcattggacggaataattgtattcacctttcccttctgctgaataggaagcgaagccaactgattcacgtcgctcttcaacgtgtagggagaataaacagcctttgtatcaagcccggcatggaacgctgcattatagcccgttgtcgccgcttcgaacaaagcattgaaagtaggcatcagatgcaggctgccgctctttatgcccgctttatattgggcatccgtctcacccatcagcaccagcagggcgcgggcgtgttcgtagctacctataaatgcatccttctgctggcgcaggcgtatcatgttcagcacctccgcaccatactctcccacttgtttgaactgaatgagccaaggccttatttcagttatcaacggacgattctcatttcccgatgcaagcaatccatcagcggcaacgattatcttccggcattcctcagctacctgccgataggcatcttcatctatctcgtttttctcttgataagctttcaacaaggcagagagagcaggctgaatggcaacggactcttcacggcggaaacgatgtccattctgtcccgggtcggaattatgagcagcgaagatttccaaatattcggcatgaagtggcataaggtctctgactgcatgtttccaagaagtttcactatcataattctccatattccaagtataatcagctacactgtacagagagattttggaagcctcggcatgttccatcggattggaaacaaaagcagacatatcatcttttatatcaagcccgtttccataaaccggccctagcagcaaatggtcttgtacataatccgaaacggggaaattccaccaaatgtacgccttacgtttcagcagcggattgacgaagtccagcgtagacttatctatagtagcaactaccatatcaccggtccacatcaccttgataccctcgttcaacttatcaccaagcgtagtgagatagcctccttctacatcggtccatgacttgttgtactctgtgggacacaatatcaatggtgcaacatcccgcttgacttttacaaaatggtcgtcaatatagttcaacagttcagcctgcttgtccgcctttgtcccttcacccgaaatatcatcaaagaaaacggcaaaaccacgcacacccaactggtacatgctttcgaacttctgcaacaataacgagcggtcttcttcattccagcgaatatcctgacccggatgaatggcccaatagaaaatgacattgttctccttcgccctatttaccaataccttcagttgttctccttcttgggcaggataaggcttgcgccagttgggagtccggtgataagggtcgtctttcggtccatagatatagacattcattttgttccgaccataaaaatcaagctggcgtatacgcgcctcctgactccaaggagcaccgtaaaacccttccaccacaccccgatagggaacatcgggatagtccgtcacttcagccaaaggcagcttacccaaagcaagcaactgcgcaagagtctgtacaccatagtacgctccccgctcgtcagcaccggctatgacgatgcagtctttttctattttcaggaaataaccttcggatttgcgtggaatcctatgttggtatttcttaataatcttatctcctttcactcctatatatacacggaaagaagcgccaagcacctcttccggcatcaatgaacggagtaaaggcaacgcaggtccgtcctgcacggaattgccggaaaggatctggtattgttggggaatatcaacagaatctttttgcgtaatatattcttggggagtaggttgcaaatgaaattcttgcgcacaaagcgtcgctgtcgtcaacataccgaatgctcccagtaatagtaatttttttctcataagcggattattaaattaaggaatatctatgtattaagaaaactcttccatgcattcaaggttgatacgttcaaaaataagaaataaatatgaaaacacgtacaaatacagacatttatttcagtttaaagattcatttattctgcatccgtttgagttcatcgcacactgccggatgcaggaagtagcgtacatcttttccctcctccatggctcgacggataaaagtggagctgatttcgaataccggagaagaaacagtccgtacattctgcggtaaagaggcagtctctaccggatagccgggacgaggataaaccagaagatgattttcggcaataatgcgttccgactcgtaccaacggtggaacagcttccagttgtccgaaccaataacaagatggaaagtgtgttggggataagtccgtttcagcgcgtccaacgtatgaacagtataagaaggccgaggcagatggaattcaaaatcggaagcgcgaaacttgggataaccctcggtggctagctgcaccagcttcaaacgtaacttgtcatccatcagatcgttttcttccttcagcggattgtggggggtgaccataaaccacacttcatccaggtccccgtattcgcaaagatagttggcgagggccaaatgtccgatgtgtatcgggttgaatgagccgctgaagattcctatatccactattctattaatttaaacaagaaaatcacaaagggtgtcctttcaacgcacgccaggcagtccatgaattgacagccgtcaccacagcaataagaaacatcggaatgcttgtccgagattcctgataatgtatatacaagataccgacaacaagggcacaaagaaataagatgcagttaataatcagcaatgccctattgagcttcggattattcttctttttcggtgccaactggttatgcagtcctccattttgcttcatgagttcaaaaattgagtaatcactttcaaggcttccgctttagctgtttccaagtcatcattcacaatcaccgtatcaaatctcgatgcaaagcccaattcatattcggctttcgccacgcgactctctatcacttcgggagcatctgttccgcgtcctaccaggcgcttgcgcaattcctccaccgaaggcggttgaatgaaaacagacaatgcacgttcaccatagaatttcttaatattgcaaccacccactacatccacatcgaacacaacattctgcccggcagccaattgtttttccacctgctccttcagtgtcccgtaaaaacggtcctgatacacctcttcatactccaagaattcatcattggctatgcggtggcggaattcatcgggagtcagaaagaaatattccactccatcttcctccgttccgcgaggcgggcgactggttgccgagatggaaaatgagagattcagattctgagtcagcagatagttgataatcgtcgactttccggaacccgaaggggctgaaaatatgataagttttgccatgaaatttaaatcacattacattcaatacttgttccttgatttgctccagttcatccttcatctgaacgacaatcttctgcatctccgcatgattggacttactgcccaaggtattgatttcacgtcccatctcctgagcgatgaaccctaacttcttgccttggccggttccggtttccagcgtattgataaaatatttcagatgattgccaagacgctgtttttcttcgttcacatccagcttttcgatgtagtagatgagctcctgctccaggcggttcttgtcataatccacactcaaggtcttttccagtgcatctgtaatacgttccttcactttggctacacgctctttctcatagggagcgatagtctccaacagatgggagatgttggagatcttctcacggaacttcttttcaagggcagctccttcctgcttacggaagtccaccagcgcaccgacagccttttccacagccgaataaaccacagcccattcttcctcactcagttcctgcgtttcattcttggtcatcacatccggcatgcggagcaacgtggcaaaccagtccgtcgcatccggcacaggtattcctagattttctgatatagcacaaatctgcttgtaatatccctccaccaatgtctggttgatgggagtggcgctttccgcactctctttcttttctatccaaagactgaaatccacctttccgcgttccagtttccgtgatatttcattacggatttccatctccttctcacgataaagcggagcaatgcgggcagataagtccattgccttactattgagcgactttatttcaacgttgattttcttatcaggcagttcgacggttgctttgccgtagcctgtcatggattgtatcataatgttatagttttgcgcaaaattacacgattattttaattagtgaaaataatcacgtaaatttgccacaataaaatcaagaataaaagttatgtcatgtatcttgcatattgaaacgtccacttctacctgctccgtagccgtgagcgaggacggacagaacgttttcaagaaagaggacctgaatggcccttcacacgccgtttcattgggagtctttgtggacgaggcgctatcctttgccgatagccatgccatgccgttggatgcagtcgccgtaagctgcggcccaggttcgtataccgggttgcgtatcggcgtgtcaatggcaaaaggtgtctgctatggacgtaacctgccactaatcggactggaaaccctgaaagttcagtgtgtaccggtattactctaccacgatgagctacccgacgacgcactgctctgtcccatgattgacgcccgccgcatggaagtctatgctgccatctacgaccgtgccttgaaaccggtgcgcgacattgcagccgatattgtggacgaaaactcctacctggaattcttagagcgacatcccgtctatttcttcggtgacggtgcggccaaatgcaaagagaaaatcacgcatcccaatgcacacttcatcgacggcatccgcccgcttgccagcatgatgttcccgttggcagaaaaggcaacagccgaacaagatttcaaggatgtggcctatttcgaacccttctatttgaaggaattcgtagccggcacgccaaagaaacttatttagggtttagcgattagggattagggatgaataccatgcggtatcactacgtagcccattaatcactaaccactaatcgctaaaccctaatcactaatcattgaacattaatcactaattaaagatgcaatataacacccaacaaaaacggatgcccctgcccgaatatggccgcagcatccagaatatggtagaccacgcgctgacaatcgaagaccgcgcagaacgccagcgctgcgcaaatacaatcatcaacatcatgggaaacatgtttccccatttgcgcgatgtgcccgacttcaaacataagctgtgggaccaccttgccattatggccaacttccaactggatatagattatccgtacgagattatccgcaaggacaatctgaacactaagccggagagtatcccctaccccagtaccaaaatccgttaccgccactacggccgtacgctggaagtactgataaagaaagctatcgaattcccggaaggagacgagaaacagaacttgatagccctcatctgcaatcacatgaagaaagattacatggcatggaataaagataccgtcgatgaccgtaaaatttcagatgacctcaccgaactctctgacggaaaactgcaaatgacagacagcatcgtccgactcatggccgaacgtattgaccagaactaccgtccgaaggtgaataaccaaaataaccggaataacaaccggaacaataaacgaaaatactaaaattgaatgattagcgattagtggttagtgatgaatgtcatgtggcatcaccatgcagaccactaattactaatcactaacccctaatcactaacttcatggcatcatttgtaatcgaaggaggacacagactttccggtgacatttacccccaaggagcaaaaaacgaggtgttgcaaattatctgcgccacattgctcactgccgaagaggtgactgtgcacaatatcccggacatactggacgtcaacaaccttatccaattgatgcgggatatgggagtcagcgtatctaaaaaaggcattgacacttacagttttcaagctgccgacattgattttgcctatctggaaagtgacgcgttcctgaaaaaatgttccagcctgcgcggttccgtcatgctggtggggccgatggtggcacgtttcggcaaggccatgatttccaagccgggcggagacaagataggacgccgccgtctggatacacattttattggtatccaaaatttaggagccaacttcatctataatgagaaacgtggcatctacgaaatatcagccaaacaactgcatggcagttatatgctactcgacgaggcatctgtaacgggaaccgccaatattgtaatggcagcagtccttgccagaggcaagaccaccatctacaacgccgcctgcgaaccctacgtgcagcaactttgcagaatgctgaaccggatgggagctaagatagaaggcatcgcctccaacctcctgactatcgaaggagtggacgagctgcacggaaccgagcataccatcctccccgacatgattgaagtgggcagtttcatcggcatggcagccatgacccgtagcgaactgaccatcaagaatgtctcctacgagaacttgggaattatccccgacagtttccgccgcctcggcatcaagatggagcagcgaggagatgacatttacgtgccctcacaagagacgtaccagatagagtcctttatcgacggctccatcatgaccattgccgacgcaccctggcccggactgacaccagacttgctcagtgtgctgctggtggttgccacccaggcaaaaggcagtgtactcattcaccagaaaatgttcgaaagccgcttgttctttgtggacaagctgatagatatgggagcgcaaattatcctctgcgacccgcaccgcgccgttgtcatcggtcacgaccacggctttaaactacgtggcggcaacatgacctcgcccgatatccgtgcgggcatcgccctgctgatagctgccatgagtgcggacggcatcagccgcatccacaacatagagcagatagaccgtggctatcagaacatcgaagggcgactgaatgcgctcggagcaagaataacaagaatagaataagatgataaagagagaagaagtatataagataggtatattcaacaagccccacggcattcacggagaactatcgttcacttttacggatgacatcttcgaccgggtggaagccgaatacctaatctgcctgctggatggtatactggtgcctttcttcttggaagaataccgtttccgctccgacaccaccgcccttgtcaaactggaaggcgtggacacggcagaacgcgcccgcatgttcactaatattgaggtctacttccccgtaaagcatgcagaagaggcaggaccaggtgaactgagttgggacttcttcgtcggttttcgtatggaggaagtacatcacggcacgctgggagaagtgacggacgtggacacatcgaccatcaacacactgtttgtggtggactatcagggagaagaactgctggtgccggcacaagaagagtttatcatagacattgaccagaagcacaaggtcatcaccgtagacctgccggaaggtttgatagctttggacgaaacagaagaggtatgaaaaagaaacgaagaaaagcattttggagtaacatcaagttcaagtacagactgacgattacgaacgagaatacccttgaggatatcatcacgttgcgcgtatccaagctgaacggactgtccgtattgctctccgtgctgttcgtattgtttctcatcgcctccctgatcgtagccttcaccccgctgcgcaactacctgccgggatatatgaacagtgaaatccgtgcccaggtagtggagaatgccttgcgcgtagattccctccagcaactggtgaacagacagaacctctatatcatgaatatccaggacatcttccagggcaagataaaggcagataccatacattccatcgactcgttgacccacctgcgcgaagattcgctcatggaacgtacacaacgggaagccgaattccgcaaacagtacgaggagacagaaaagtacaacctgacgagcatcaccgctcgccccgaaatagacggactgattttctaccgccccacacgcggcatgatttcatctcccttcaatgccgaaacaaaacacttcggcacggacattgccgccaatccgggcgaaagcgtattggccaccttagacggtaccgtcatactgagtacctatactgccgagacgggttatctgatagaaatacagcacaaccaggacttcgtgtcagtctacaagcattgcggctctctgctgaaacgggaaggagatgcggtgaaagggggtgaagccatcgcactggtaggaaacaccggcgagctgtccaccggtccccaccttcacttcgagctgtggcataagggcagggccgtaaatcccgagctttacatcgtattttagtctccaaatagtaaattgtaaatagcataatagtaaatgaaacagattgccatactcggttctaccggttccatcggtacacaagcgttgcaggtcatcgaagaacatcccgaccagtacgaagcatacgtattgaccgccaataaccgcgtagaggaactcatagcccaggcacgcagattcaagcctgaggcagtggtaatagccaacgaatcgaaatacacgcaactgaaagaagcgcttgccgacctacctatcaaggtatatgccggcgcagatgccctctgccagattgtgaccgaaaatcccattgatatggtattgaccgccatggtgggatatgcagggctgaagcccaccatgaatgccatccgagcccgtaagccgatagcccttgccaacaaagagacgctggtggtggcgggagagctcatcaatgacctggcacgcttcagcggtgtccccatcctacccgtcgactccgagcactccgccgttttccagtgcctggccggtgagataggcaaccaaatagaaaaagtgatactgactgcctccggaggtccgttccgcacctgcactatggagcaactaacaaccgtcaccaaagcgcaagcactgaaacaccccaactgggacatgggcgccaaaatcacgatagactctgcttccatgatgaacaaagggttcgaggtaatcgaagccaaatggctgttcggtgtacgtcccgaccagatagaagtcgtggtacacccgcaatccgtcatccactccatggtacagtttgaggacggtgccgtgaaagcacaactgggaatgccggacatgcgcctgcccatccaatatgccttctcctatcccgaccggttgaaagcctctttcccgcgcctggacttcaagctgtgcacggaactgacgttcgagcaaccggacaccacccgtttccgtaacctcgccctggcctacgaagcgctacatcgtgcaggcaatatgccttgcattgtcaatgccgccaatgaagtggtggtagctgccttcctgcaggacaaaatttcgttccttggcatgagtgaagtaatagaaaagaccatgtcgcgcgtatcctacttacagaagcccacctatgaagactatgtggctacggatgccgaagcccgacggatagcagaagagctgatttgatagatacaccggaatgaaaagaattataaaaaacatctactcatttgatacgttaaataagaaaacgtacctttgcgaaaattataaaaatcgtaaaacagcaaataattagatggaaacattcttgattcgtgccctgcaactcattatgagcctctcgttgctcgttattgttcatgagggggggcacttcctttttgcgcgtctgttcaagacgcgggtagaaaagttctgcttattctttgacccttggttcacattattcaagttcaagcccaaacacagtgacacggaatatggtatcgggtggctacccttaggtggttatgtaaaaatagcaggtatgatagacgaatctatggataccgaacagatgaagcaacccatgcagccatgggagttccgtgccaagccggcatggcagcgcctgctaattatggtaggcggtgtattgttcaacttcctgctcgcattgttcatctattccatgatactttttacttggggcgacgaatttataccagtacaaaaagccccattgggtatggattttaacgaaacagccaaagccataggcttccgcgacggcgatatcctaatatctgccgacggggtaccgttcgaacgctatgacggcgacctgctgaccagtattgtcgatgcccgccaggtaagcgtattgcgtgacggggaagctgcttcagtctacatccccgaagacatgatgaaccgcttgctggcagacagtgtgcgtttcgccagtttccgtttcccttatgtagtcgacagcctgattgtaggataccctgccgcttccgccggtctgcaagtaggtgacagcatcacccacttggatggaaagtcaatagcctactacgacttcaaagaagagatgctgaagcgcaagaaagccaatgcatcccatgaggtaaccttgacatacgtccgtaacggtgtgacagacaccttgagcatgatgaccaatgccgactatgaaataggcgtagcagcacgtacggcaaccgacaaactgctgcccgttgtccgcaaggaatacagtttcctttcctctttccctgccggcgtatctttgggggtaaagactctgaaaggctacgtaggccagatgaaatatcttttctccaaggaaggagccaagcaactcggaggtttcggaaccatcggcagtattttccccgccacgtgggactggcaccagttctggtacatgacggcattcctctccatcatccttgcctttatgaatattctgcccatccctgcactggacggtggacacgtgttattcctcatttacgaaatcattgcacgccgcaagcccagcgacaagtttatggaacgtgcgcagatggtgggcatgttcctcttattcggtttgctgatttgggcaaacttcaatgatatactgaggtatttcttttaaagaacaagacataaaaaaacgcatcatccattcgcggtagaacggatgatgcgtttgcatcaaacagatgatgtattcggggcaagcagacgatgcgtttgaaccaaacacatcatctgttttttttgtgtcttataccaaatggccgatccactcttcgcggtcgcccggaagcaggtctattaccggaacttcaaccattgtatagcaaccaggctgctgacgcatagcggcacgcgccacacataccagcacttgtgccgtgagggcaggattgttgatacgcatgttgaactcaaatagctggttctgcgtcttgccagacacacctttacgggtcaggtttaccccatgacccatatcgagcagtgcgtccacactcggaaccaattttacatgtgtttcgtcattcacgaagtacgggtcggctttgatggctgcagccaccttatcaaattcgtaaccatccttcaactcaatgtacaccatacgacggtgaatgccggttcctgtaggaatagtcatggaaagagcggctttcacaccttcgatggcctttacagccacggtgtgtcccatgctcatacccggaccaaaattagtataggtaatgcctttcggagcaatggcttccagcatagtgcggacaatggagtcactacccgggtcccagccggcagaaatgatggataccgtattatgctttttagcctctgcatccagtgtgcggcgcaaggcagtgatacccgtatggatatcgaaactgtccacagtatgaatgcctaaagcaaggatctcctttgcatactcttccaccttgcgggtaggcgtacaaaggatagcaacatccacgtctttcagttccttgatattcttcacaacgggatatgcactcagttccgcaggacagttttcagctccggcacggcgtactacaccggcaatttcgaaatcgggagctgcttgcagggcttcgagcacataatgcccgatattaccatagccaacgatggccgctcttacttttttcattctttttatgaatttatttatcagttttctactttatcggcgcaaaagtaagcattttaatttattatatcggcagaactccctgctgtttcacacagtttttctttttttagtgagtgaaagtccaataataattcatacattcgcagatgatatgtatgcaaggcgcattttgggccgacaagtaaaagaattatgatagaatacatcagaggcggaattgccgaactaagtccggcaaccgcaataatagactgcaacggattgggatacggcgtcaatatttcattgaacacgtatgccgccatccagggcaagaaagaatgcaaactatatatatacgaagctatccgtgaagacgcctatgtcctctacggattcgccgacaagcaggaacgcgaactattcctgctgctcatctccgtttcaggcatcggcggaaatacagcccgcatgattctctcggcactctcgccatccgaactgataaatgtcatcagcacggaaaatgccactctactgaaaacagtcaagggtatcgggctgaaaacagcccaacggataattgtggatttaaaagacaaaatcaagaccggcagcgttgtagccggcaacgcagggaccataggtacactggtatcggcagccaacgcacaagtacaagaagaagccgtagccgcccttaccatgctgggctttgcacaagccccctcacaaaaagtagtgcttgccattttgaaggaagaaccaagtgcaccggtggaacaagtcatcaaattggcattaaaaagactataacctttatctaaaacaaatcatgacaacaatcaacatgcaatattggttgggggccaatgaacgcacccgcgtactgccaacagacaaatggtacctcgacttcgccacaagcatcctgcccctcgtcaaagcctctcctctgttcaacaaggaagagctgcgtacccaaattgacgcagccatttccctcggcatgtactttcaagatgccattgcccaaagcggaggctggaaacttttctccgaagcctttcagggagtatacggaacttacctgccgttctatccgctgagtgacgattatacgcccgatgaaataaatcaggaagacattgcattcgtactgtggacattgaaatcacaattcagcatttttgacaaggaatacaccttgttcagtccttatgacaaagacctgcttgcattaagccaaagcgcctatgaactgatggatgcacgtttcgaagaagctcccatcagcaagggagaatcttccttcctttgggtaatgggacttgatttactggatatacccattactccgctgccggaagtcactccggaaaccaaactgagcaaagatgccgcccactgtctggaatacagccaggggaaaccgctgctatacttcaccgattacaaggagctttgcactttctttgtcaatgtcttgggatgggaaaacaaacggtccgcattattgcccgacctggaatacaaaaaagagttcgtgatttatgccaacgccaaaggtatgctcgtagcccacaacgtggccgcctatttctgtgaagaacataacccgatgtacgatgccaaacgcgctgctgcagagggttacaagatgttctgccaacctggagagtgtccgttcgacctgctgaaatacggaatgaccaaaggaattctacccgatgtggaacttcccttcttgaaaggaaaagaaacactgcatcaatattgggactttatagcccgctactacttatgtgaatattatgaaggcgagtaaccattccggcataaagcccaaacggagcaacaaggccaagccaaccggaaaacggattggtaaatccaaaccttcgaaagcgaataatcagcttaacagaagggtaaaataattgaaaatggataatggaaaaataaacagtgcagcgtatttattgaaaccgcatggcaattttccattatccattatcaattttcaaagttccacaatctcttccttacacaacgtcagtttctccactccttccgctgttataacccaagagttttcgataccaacgggaccaatgcccggcaaaacaattttcggctccaatgcaaagaccatacccggctccaactcctgcttcatacgcggagtcaataccggcatttcattgatttccaaaccgatgccatgaccgataaacttggccttttgagtggctcccataaagttgtcggcaaagcctgctttggtgacaatatcgatagcgagattgtaaaggtcctcacaaacagcacccggtttcgctttttctacaacagcctcttgtatgtccaggcaaacttgatgggcaacatatgccttttccggcagctttccgatagagaatacacggctcatgtctcccatatagccatagaagttaccccccatatcaaccataaagctctgaccgggctgcaacagtgcaccgttcacactgataggcagtgacgggtcaagtccctcgcctcccagagcaaaatcatagggggcaggcgcagtggcattgtctcctgccagcagacttcccataaaaatctccatactttgtccgaaggtacgaaaaatacccagacaaccttccagacgcatcaggcgctctatttcgatggataactggcggtctgtcattcctggtctataaaccgagggtatttgttcgtaagctttagcatgtgcaatgccggaacgacggaacatctcaatctctatttcagtcttgacacttcgggccttccggataagtgccgtaccacaaggaagcacctccgtttcagggaaacacgcagccaaacggttatattccgtaaaagacaactcatccccctccagcatcaacctcgcaggtatgggcaaaccacattcctttagtaagtcaggcagttgttccggtttacggataggatgaatatgttccccttcaatattgttaggacgtttgatgaataaacgggcgggagcattcaacggcagatacaagtaaccgctgacgacacgtccgtacgtatagattaagtttacattgcaagcgataagagcggcatcaatctcttgttgagccatgagagagcgtattttatcacgtctcagtttcaattcaggtagtaacatctctttgtcatttatggtttctcggatacaaagatacaacttttttaattgagaataaaaaaagtactgcccgataccttcacaggcgtagagcagcacaaaccacaaatacaaatacaactaaacaaagtttctctcttagataattccctgacccatcatggcatgagccaccttcatgaaaccggcgatattcgctcccttcacgtagttgatgtagccatcgggttctgtcccatattttacgcattgagcatgaattccgtgcatgatggcgtggagtttttcatccacttcggctgcactccagctgaggtgcatggcgttctgcgacatttccagtccgctggtagccacaccacctgcattgacagccttgcccggtgcatacataatcttattttcaatgaaaagatcgatagcttcgggcgtacatcccatattggagatttctcctacacatgtcaccttgttgtcaatgagatgttgtgcatcttcgccgttcagctcgttctgagtagcgcaaggcagagcgatgtccactttcacttcccacgggcgtttgcctgccacgaaagtagagccggggaattcgtcggcatacggtgccacgatatcgttgcccgacgaccgaagttccagcatataatctatcttttcgccactgataccattcggatcgtagatgtaaccgtctggaccggagatggtaacaaccttggcacccaattcggtagccttggtagcagcaccccaagccacatttccaaaaccggagatagccacggtcttgcccttgatgtcaatgccttttgtctgtaacatttggtttacgaaatacaagccaccaaatcctgttgcttcaggacgaatcagcgaaccgccaaattccaatcctttaccggtaaatgtgcccgtaaattcgcgagtcaacttcttatacataccgaacatatagcccacttcgcgaccgcctacaccgatatcaccggcaggaacatccatatccggaccgaggtgacgccacaattccagcatgaaggcctgacagaaacgcatgatttcagcatcgctctttccgcgcggagagaagtcggaaccacccttaccaccgcccataggcaatgtagtcaaagcattcttgaaagtctgctcaaatcccaggaatttgaggatagaaagatttacggaagcatggaaacgaataccgcctttgtacgggccaatggcattgttgaactgcacacgatagccgaggttcgtctgaacttcacccttatcatccacccacgttacacggaaagtaaagatacggtcaggttcaaccagacgttctataattttcgctttctcgaactcaggatgttggttatagatatcttcgatggaaagaagaacttcctttacggcttgaagatactcagactcgccggggtgctttgcctctaaagaggccatgatacgttcgatattcataatattacgttttaaaggttattaccttgttgacttcacgctattcaaacaaaatgtcaatgaataacaccgcaaatataggaaaacttttcaaaacagctaaattttacggttatattttgattaaagaatgataaaatgtcaaatccccggcattttttcctcagccaaaagtgttccattcttccgtttttcagccaacaattcgctataacggtataaaaatagaaaaaatataaaaagagaacaagcaaaatgacaataatgtcataattccgggtttaaaaaacaccttccgaggttcaccttccatcaaacttcgctacttcggatagtttttagagcttttatggcagttttcaaaccttattctgcctaataatggctaacattgcaacctaaaccaaaggttgacatccacatgagaaagacactattattcttatatcttctatctgccggtagcattgccgcatacgggcaaactcgcctgacccaagaccccgaactggaacggcagctccatgaaagcgggctggtacaccaacccctacccctaaacatcgagcactctttcgaagccaacggatggaaaaaggaagtcctgcaaagcgctcccctcacccgctcggcaggtacagaaggatggagtcattccggcgcaggaagcatgtccttcagtacggaaaagaccgtttccggaaaaggcagcatcaaactgcaatttcctacattcaccggaaaaagagcgaccggctctccttccgaccccgactatgccacctatggaaacagcggtgtcacttatcatctggacggtgccaacctggaaaagtacaaccgcattgcattctccatctaccccgactgcgacggggcacgtatcgtcaacatgaacctcacattccataatgcagatactcctgccaagaaagggtacaatccaccttcgggttcgcatcttatcaaccttgtcaacaagaagtggaaccaatgcttcctcgaaatagacgagtatcagcgcgacaaagtaatgtccataagcttcagcacagccctcaaaggcaaggaccggacaacgggagattcagcaacctactacttagacaacctccagttgcaaacagtgaaagcccccgagaaagtcagcggatggatacccgccgatggaaaaatctcctattcgacaaccggctatgccatcaatcaccctaaaaccgcccttatcaacacaaacgtcaccatagatgccggtaaacgcttccaactgcttaccacggacggaaaagtggcttacgaaggagacatccgggaagagacaaccaccctcggacgattcggtctcatcgacttcacctccttcgaccttcccggagagtatcggctgaaagccggcaattcattgacccctgcctttcggattggagaacggctttgggaagattcacaatggaaagtgctgaatttcatcttttgccaacgctgcgggcatccagttcccggcaagcatgcctcctgccacgcagacctgatgtcccggcatgacggacgcagtatctcctactccggtggatggcacgatgcgggcgacttgtcccagcagaccctgcagacgggagatgtggcttttgccctgctcgaagcctataataaacaaagaaacaccaaccccaccctcgccgcccgcctgcgcgaagaagcggaatggggagtggagtttatgctaaagaaccgctatggagacggctaccgcgccagcagcatgggattgctaatctggcaggatggtgtattcaacacactggacgacatatcttctgtacgcgtgcagaacatggcattcgacaatttcctctatgccggatatgaggcgtatgcctccatgacgctggacaacgacccgatgcagcaggaatatcttctgcgcgtggccgaagaagatttcgctttcgccatggagaaattcaaaaaagacggtttcgaccagttcgtccagccttacgaacacagttacaacacttcgaaaagtcagtatatggctaccatctcctggtcggcaagccaattatacaagctgaccggaaaaccttcttatgcggacatcgccgccgaatacatccgctacaccctcgactgccagcgcacggaaccgctgaaagacaaagacgggacacgcggattcttctaccgggacaaatcccgcaaatccatcgtacattacatacaccagtcgcgcgagcaggtctatatgcaggctatggtgatgctttgcgaaacccagaaggagcaccccgattaccctaaatgggtgaattccatacaactatatggagactatctgaaaggaatgatgaagtatacccatccctacggtatgattccaagcggtgtttaccatgcagaggaatataaggataccaccaacttctacgccctccatctgtttccacctgccaatgccaaggaactgtacacggaacagattaaacgaggagtacaactggacaaagagcactacatgaaacgcttccccgtgtggttcaacattttcaacggcaataccgccatccatctttccaacggaaagtccgccgccatctgcggaaacttcctgaaggacaaggaactgctcaacatcggtctggaacagttgtactggaccgtaggcaagaatcctttcggacaatccttgatttatggagaaggacacaactatccgcaactgaataccttctcttcgggagaaatgacaggagagatgcccgttggtatccgtaccctgggtaacgacgatgtcccctattggccgcaaaccaacaatgcctgttataaagaggtatggattacctcggcaggcaaatggctgtctctgattgcggaatattagataatggagaattaataacttataaattacaaattatgaaacatctgcttattttattgtttacggcttgcaccttgctgacgtacgcacaagtccccgaaggttatccggcaaactatgccaaagctcctcgcttcaaggccttgatttattacacgcaacatgcggaagaagcacacgtacaatttgcagaacaagcaaccactttcttcaagaagctcaattacggtgacggctttgttctggatattactaccgatttttcaaaatacccatacgagaaactgaaagaatacaatgtcattatcatgcttaacacatctcccaacaccaaggccgaacgcgatgcctttgagcaatacatggaaaacggaggcggctgggtaggtttccacgcagctgcctacaacgacaaaaacacgcattggccctggtttgttaaatttcttggtggtggggtgttctattgcaacaactggcctccccagccggtattggtcgaagtcgacaacgaagaacatcccgttaccaagaatctgcctgcatcattcgtggctcccgccagcgaatggtaccaatggactcccagccctcgccagaacaaggacgtagaggtactcttgtccctatctcccaagaactatccactgggtatcaaggatgtagtgaattttggcgacttccccatcgtatggtccaacaagaattacagaatgatttacctgaatatggggcatggtgacgaagagtttatcgacggtacacagaacctgctattggttaatgctttccgctgggtagtgagcaaagacaaaagcggcaacccgttcctcaaataaaacggtttccataacagcaatcaagagaataaataggggataattcccctatttcctatgttaacactacgtttttatgccgaaacagatacttttcgaaggaaaagtatctgtttcggtcgttttatatagatacccttgccggttcccaacgggccggaatgacagtttcatatcgttgaaaccaaaagtttcacttgctgaaacttttagttttaaggcatgaaactaaaggtttccctcaatgaaaccaattattttcccaatcaaaacttctcgtatttagcctcaaaactaaaagtttcatgctgagaactaagataatagccacttttacgattcacccaataaataggaggcatcatcttttagaaagattggaaagcatgatagatggttgtaacgttttttatctgtcacgggtatctatcacgatttaattgatttataatcaaaacaatacacccatttgcgtgatagcatgacagatgttttgccaaaacaaactttgtgaaggaacaaaaaatccccggtattattcacaaggaaataccggggactcttcagaaaaaaacaatcaaaacttataaccagccagggttctgtgtcaagccacctttagccctatccatttccgactggtcaattgggaagtatctgaacttctccgtccaacctttgttacctaaaatctctgttcctttatcgaaacgcagaatatcaaaccaacgctgcatttcatccataaattcatacccacgctcttcaaaaagaatatccaacaactcctgcttgctctttcccgccaagttgatacgatgctctttgtctttgaaagcgcggtctctgacctggtcgaaccaaccttgcgcatcagcactggcagttccgttgatacgtacatcaagctccacagccagcagcaaaacatcggcataacggtaaatacgccaagagttataatagttatccgtaggattcaccgtagacgtcgtctcctttctcggatgaatcttatagtgccccagaccctcgtaattttcctgctggtcactgacttggaaagcacttcctgccggtagttcacctttggccaccatttctgccacttttttagcctcgtccgcatagacaatgactgttccctcacggcgcgtatcaccttccttaaacatgttgtaaacagtactcggcatggtattctgcccataaccttcgcccaagccgccctgctcggcacttctcgggtcaacaatgttacgaccgcccaaagaacgtgcaagcccaaacccttcaccggagttattgccggcataacatacctcaaagatagattccgcacaccattctccgtctttcacccataagctttgataatcagggttcaactggtatcttccactggtgattatttctttcatgtcattcaatgccacctgatatttagtctcatcacgatggaacaaaataattttggcacgaagcagcttggcagcatcccggcaaacgcgtccctgctgtgtagcactgcgctggggcagatacttagtcacttcgtcatccaagtcacccatcataaactcataaatttcttcacgggttcctttggcaacgctatacatttcactggctgccagataatgtttgataagcgggaattgctcataccccataaacagatggtaatagaaaatggcacggtaaaagcgcgcttcggcagaaatggaattgacaaagtctgcactgaggttgcatccggccaatttgtcaatcaacagattggcagcaatgactccattgaacaagccaaaatcccactcattccaccaagaaccatatccccatgcaccgaaacaagaagtcgcgtcataggtaaaagtatcccatttcgtcttgtaagacccctcaccgataccaccaccggtttcggactcatcacccagcaaagaagagtaagaccaaacctccggcatacgggtctgcatttcattcatcacggcatacaagcccttcatcatatcgtcttccgtcttatagaattcggtttctgacacctgagttctcggattcacttccagaaaatctgaacaagctgtggtcgacaaagccatcgcacccaaagccaatacctttaatatcttattcattgtatctaatttttaggttaatcaaaatgtaatattcgcaccgatagtataagtacgtgcttgcggatatgttccaccgtcgaatccgtcgcgtgtacccacttccggatcataaccgctataattggtgattgtaaacagattctcgccctgcacaaagaaacgcagtcccttgatgccgacacgctgcaacatctggccgggcagactgtaacctatctgcaacactttcaaacgcatatacgatccatcttctacaaagaagtttgaaacctgatagttattgttgtcaccatctatgatacgtggtacccaattggaagttccttcaccatgccaacggttcaaccaggatttgtcgtagttaccaaaagtcacattggaacgtctgtacagtttataaatgtcgtttccgatacttccctggaagaatgcactgaaatcaaatcctttccaatcggcagaaagagtgaatccatatgtccagtcagggttcggcttgcctatcatggtacggtcatcaccattcaacccattttcaccatccaaatctttaaaacgaatatctccaggcttggcattcggctgtatcagctgagtctttccgttagaatctacgtaggtatagctatctatctcctgctgattctggaaaataccatcatgcaagtaaccgtagaagaagccgtacggacgcccgttctctctccaactgacctggccgcccataccaccgccgatattattgagaccgacacggtcggggccctggtctgttacggtattcttcacataagaagcatttccattgatacccagattcacttcacccaccttaaagcgataggacgcttcgaactcgataccttcgttcttcactgtacccgaattgaccgtcatactgccataactggtataaagaggaatcggcatggaaagcagcatgtccttcgtcttcttcacgaaatagtcggcagagaatgtcaatgcactgttgaagaaacgcaagtcaatacccaagtcggtctgttcggaggtctcccatttcaaatcggcattggcatagccactgggcagcatgcccgtatatacctttccatttatgactgcattcttaccctgactcatcatacttgtataggcaaaggagccaatacgttcgttaccattctgtccccagcttagacgtatcttggcaaaatccaaccaggaaggtctgttctccatgaacttctcacgagtcaacacccaacccaaagaaaccgaagggaatgtagcatattggtgctcgcgactgaagtttgacgaaccgtcccgtctcactaccgcttcgaacaaatacttttcatcataattataattgatacgtccgaatatggatgcaatacggtgatcttccgccccaccccatactttggactgttcttcgggcgctgtggccgtgtctatatatcccttgtctatatccaccaccagcagattataatcttccgcttccaaattggagtaatggtaggaagacatacttgtaccgaacagtgcacctatattatgacggccgaaagactttgtatacgacagtacattttcccactgccaataggaagactcccttttcttatcctctaccttggaagtggcattcttactggtagcatttagctcgtagaccggagttacattcttgatggaattgaacacccattccgcaccataggtagtcttgaacttcaagcctggcaacaagtcgacatcaaggttaaagttcgcaccgaaattctgaggcatagtcctctggttatgactgacctgcatggctgccagcggattggttatttcacgcatctcgatgatattgtatgccaggccgttgggagcaatgacatgatttggataagttacggcatattgctccagtatagcagggtcggtctgataaaccggctcggtaggaggcaacatattcatggaagtaatcaagcccgctgcttcactattgccaatagtattaccagtctggattgacttggaatagcttgcaattgcaccaaaactaatcttattcaaccaatttcgtgatttcgtgtccagtaatacattattgtaattcaagcgtacattgtagcgttcataatcagcatgtcctttggcataaataccttcttgctttacataaccgaaagaagcataataggtagagttgtccgtaccgccactcaacgaaaccttgtggttcataataggagcattcttgttctgcagttccttttgccagtcggtattgacgctggaaacagtcgggaaataagggtctttacctgcattggcagccatttcattcatcaacatctgataatccgcactacccagcaaatccaccttcttggaaggattctgaataccatacgtaaattcatagttcaaagtagccttccctttagtacccttcttcgtagttatcagcacaacaccgttagcaccacgggctccgtaaatagcggcggaagctgcgtctttcagcacttcaatagactcaatatcagaaggattcaaatgactgataccactttcagacggcatgccgtctactatataaagcggatcggagttgttgaccgtaccggtaccccgaatacgaatctttgattccgcaccgggctgacctgaattagagataatctgtacaccggaaactttacctttcaaagcattctgaatatttgtaggattacctttatccaactcttcactggtaacacggctcacagcagacgaaagtacactcttcttttgtacaccatagcctactacaactacctcgtccagcaactcagaagaatcagtaaaacggactttcagatttgtatctgcagcagtcagtttatactcaataggctcataaccgataaaggtgaagaccaacacatcacccacaaaagctttcagactgaaattcccatcaatatccgtcacagtacccacagccggattacttttcatactgacattagcacccggaaccgtttctccggaagggtcataaacgacaccctgcacattaatttgttgtgcgaagagctgcaaagtgcaactgagaatgcaaagcagcaaaaggactctttttcttttcatgataatagtattagtttataaaataggaagttattcatattgtattgatacaaattccaatacttcgataagcgaaattacgtactaaacaagaaatggaagttgaatatttctcataaggagttcatttactaacacatccataaaaaacgttttattttaaacttaaagtgataaagtttaaacccataaaaaaacggatacgtttctgtacgtacccgttttcttccaaatccattgattataaaaagtattacctttctaaagtccagttaatggcatttctgaacatggtcgtaaacccttccgtttcgtacaacttactactatgccctatctggaaataaacattgcgtgcctttttgttttcattgacccaaaccaccggatgatcgcccatcttgatgtccgacgcaggcgtgtagctcgattcgtctacattggccagtacatgtacattggggcgcgggctcttgtcataagtataccactcgtcatcgggcacaacgaaagaggccggaacatccttcattaccggatgctgtttatcttccacaatcagcgtaccgttggccagcggagctatgtagttcttgaaacgtacaccacccatgaaatcagagaaccattgccacatgggataaccgtcaaactcgcccagcaaagtggcatgatggaaaccaatccagccgccatgcccttcttctatatacttgacgaacgcatcttccgcttccttcggccaagtataaggcgggaaatccaattgaataaccaggctgaactgcgacaagtaagcctccgttatgttcctggcattgtttatctcggtaatactgaaattcccctttgcaccttcggccgccaaccacctcaaaccggcatccgtaaatcctccgtgctgtccgccacgttccgtcaacaccagtaccttcgccttgtgcggcttgcccaacaggttttctgctactgtacggcgcaaatcaccctgctcattgtctccgctataatcccaatacatgcctcccagcaaatctttatccagaatatactgacacttgatggcaagtgaacggggattctcaaaaccaaataccaacgtatcattcttatcggccagataaggcacttgagccacctcatcccacttttcagtatattgggtatccgtattccctaccttattatagtcttggaagctgggataaccgtcacctccacgaccatagaagggcatacccatcaccagcttggaaggcggtacgcccgctttcaagtgtgcagtaacggcaccgtccgaagtaatgtcaccgctatgtcccgacggataaagcgccgaatggtgcttgggagcagaagccatgtcataagccatgatattcacaaaatcgacggaaggcaagatagccttgaagtcaatgtaacgggcagaagctacggtggcaagtgtcagttccttttcattgccgatggcagctctgatatcctgcatcagaagtgtaaaattctccgtatcgtccggtgacgaagatatatttgccatagagctggtgggatattcccaatcgatgtcaatgccatccaaagcgaactccttcaccacacgggcacagtccgcggcaaaagcacggcgatattcatcattggcagccatctcactgaaacgtccgcttccccagccaccgatggaaagcagcactttcagttccggcttctgtttcctcaaatcaacaatctgtctcaaacgttcctcattatcaatcttgacaccgttaaagctctcgtttacatgaccgaacgcatagttgatatgcgtcatgtactgcgggtcgggcatcacctcactccacgaagtaacataagcaaccacaaccttcgaattgcgggaagccgcaacgacctcttctcccggcttaacgctaccgcatgaaaccaatacgcccaaagcggcagccatcatcattctaatttttttcataagtactatctttaattacaaattatcgcaggtctgacggacccgtgaacctatcaatgcataatacagcataaacgcttctccaaaaagaacgatgaaccatgaccatctccagcctccaagaacatcggcaagcactccttgcaacaagggcaatatggcaccgcctaccactccaatcatgaacacacccgaagccaccgaagtgtattttcccaaatgggcaacggacaaagtaaagatagctccccacatgatggaatggaacagacctactgccgtgagcagccacggattattcagaagaatggccagtagggcgagtagtcctgccgataccgtagtaaccgtcaactgcacgcggggagaaattctgctcaggctgctccccaccaggcggcccacaagcataccaccccaatagagcgtagccatcagtgccggagaagcataatccatctcaatggcgtacagattgatattggctccgatacagacttccactcccacataaaagaagatagccactacccccaatgtcagatgacggaaggaccatacacttttttccagcttctctcccttctctaccctggttccttggatatcgggcaaagacaatttcatcaacaacaatacaatcaaagaaataacagccatcaaggcaaggaacggaaccatcagctggtcaatctgaatgtcctccatagacagaccgccaaacacgacaccagtcacgaaataaggagcaagcgtagttcccacagaattggcagaaccgcctatagccaaacgctgaatggactgggtacccttgacatggcaagccgtcagataaggatttataaccacttgcagaatggtagccgaagcccctaccacgaaagaacccagtaagaaaatcaagaaccctccagggataacattatttcctgcatgccaattcgcttcaggaaagtgtactgtgaaataggaagaggcaaagaacaaaccaagtcccacaatcatcaccagcaatccacgcatcaatgttcctttatatccgtatttgctaatccacgacgagcctacccctccacaaaccggataagcaaggaaccaggagaaagtaatcaaagtagcaaaagtatttttcaacccgcccacttccgaaagaaaagtttctttcagaggaccctgaaactgagtattggcagtcgtaaggaaacctacaataaagaacaagaacaccatcgtgatgaagggccccatatagtttatttgtttttcttgttgtgtcatagtattttgattattaattcaaataattagttatcagtcgcctgcaaggcgacttagcagttaagcatgcttgccgccgcctcatccagcagaaattcacagttgggatgaagctgaaggatggaagcaggaacatctgttgtcacaggcccttcaagcatccgcttgacaatatccgctttattagtccctttggcaaccagtacaatccggcgtgcctgcataatgttctttattcccaaagtagcccctcccaactctttatcgggaggagtacccgtttctctacggatgcgttcttccagttccacattcatccgggtcacccatgcttcaccgccaaagggagattccggctggttgaaccccaggtgtccattctcacccaaccctaaaatcagcaaatcaataccgccacggttcgcaattttctgctggaaatccctgcatgactgttcaaaatcaccagaaatggtaggcagcatcaaaaaattctcttccttgatgcccaatgtatccatcaactccgttttcagcatcgtgtagcatgctccggcatattcgcgcggcacattcgttacctcatccaatccgaagaaagtaacggtatccaccttaaacggatatttagtatagatttctcccaccaaccgatgaagattgccggtagtacgtcccgtcgaaagtcctatcacactctccggttcattcaacatctgcccgatgatgcgccatgcagccgtgcagtcaaactccttttcattctttgttattgttattttcatattcttaatcattaattcctaatcacatattcatcgccaccgcgccggcccccagaagcccgataaatccgggattcagtttcgtaatgacaaccccgttgctgacaaaacgcatggtcgtaggatgaagtttctccagaatcttctcgtgcatatacccgtcggccacaatgcctccacccaacaccaccgtgtccgggtcaatcacacgtaccagattcatgataagattggcaagcgcctcagctgcattctccaccagcaccgtacagagagggtcacctttctgactaagtgcaaacacctcactcacaatcacccgttcccctttttcagccggaatatgcaggctggtctcatactggttgcggagcagatgggcacaattgtcaaaacctatgccggcagcaatcgcctccacacagtccatccgtccacaaccgcatttaatgcctatgttcacacctacacgcacgtgtcccacttcgccggcattgaaatggctgccacggatttgtctcccatttatcaccgtacccacggcaatgcctgtacctacatttacgtatatgaagtttttggaaatttgtccgaatccccagacgcgttcggctcttgtagcgctcttcacatcattgtctatatggcaaggcatgccatatatatccgacagttcctttgccaactcaatccgctgtgtcctgctcgggtcaatctgcagccagacaccttcgttgggatctacacgccctatcagcccaacacccatcgctaccggtttctggtcataccagcccacggtacggatataatcatcgagcgacgacttgatgatttccagcgcagcctgctgattaaagtaaccggagtcatatttcttatacctcaaaatgttgccacggctatccatttcgccaatcagcaacttcgtgcctcctaaatcaagacctaaatacgtttccattttttatatgcgttttttaatattgtttactgtccacaatattacgcactatcagggagacaagggtttattctctgacaaaaaaggtttaatacttgtcagcagtggttcaaaagcagtcttcatggctctaaattttgctgggactggtaccaaactgctttttgaagcatgtactgaaatatttcgggtcagaaaatccgaccatattcgccacttcccctatcgaatatttccgggaaaccagcagctcttttgccttgttcaaacggacaatgcggatgaagtcattcggtccctgcccggtcagcgtctttatcttattgtagacagaagtgcggctcatgcccagcatccggcagaagtcattgatggagaattccgaatcggacaactcctcctcaatcaccttcataaccttgtccagaaactccttgtccaactggctggtatagtctgtctcttcgggctgcgcatccatcgccaacacggtttcgcgcaaatgctgcctattctgaagaatattcctaatacgcactttcagcacagacaagtcgaaaggcttgatgatgtagtcattggcaccggcttccagtccgaagatgatattttccctctcactcagtgcggtcagtaatataataggtatatggcttgtatctaccgatgacttcagaatccggcacaattcatcaccttccagtaccggcatcacaatgtccgagataataatatcaggattgatttcccttgccgtctccaatgcctttccgccgtcgggcacggcaactaccttatattcggaagacaagctgtccaccagatactccctcatatccgcatcgtcctccgccagaagaaggacattcttcccggcacgttccgtttcttcatgcacagccccggtagcggcctgagcttcttcctggccgtcagccttcgcttccaccgccacgctcgcctttatcctctgcgggaaagttaccgtaaacgtagttccctgtccctccacgctactgaaagagatggtgccgtgatgctgtttcacaatgcggcgcgtaatcatcagaccgatacccgaaccggtttcctcaaagttcatggcattctgggctctataatattcgtgaaaaatattgccctgctcctcttttggaatgccgatacccgtatccttcacttcaatagtccacttctttcttgcagtcttcaccagtatgtgaatgactcccttctctgtatacttcaaggcattggagagcagattgtctatgatatgatccatcttttcccggtcaatccaaaccttgggcatatccggctccacctccaactctatcccgacgctcttctgcatggcggctaagtgaaactccgccattttttcctccagataagccttaatgtcgtatggagaaaccttcagacactcctcggcatgcagttccgttttctgcaactcaagcagttgagtaatcattcccatcagtttttccacattcttcattgccaccgcaacggttttcttaccctgctccggaagtccctcctgcgcttcgagctcgctcagcggagcctttattaaagtaaccggtgtacggatatcatgggctatactgataaaggaacgtatcttgtcccttatacgcccttcgttcaccttatgcctcctatactgcacaaatatgtagacaaagacagacaacaagatgaaatagatgaacagcgcccaccacgaaacccagtaagggttatgaatgacaatgtccagacttctttctcccacctgctgcccggtgtatttatcaaatgcccgcaagcggaatacatacttaccggacgagagattcatatagctcacgttccgcactgaattggagtgttcccactcttcattgtgattttcgagcctatactcatacctaatacgatgcgggactgcaaagttgatggcagagaaggaaattgagaaggagttttgattatacttcaaatctattttccgggtatcattgatattcgtttgcaaaagagagcctttcattcccgctttgactgattcataaagcagtttaaagtctgtcagaatcagctcaacgggtgcatgagtccccaagttcaaagacggaaggaaggaaagaaccccttctgcggtaccgaaagcaagacatccattcttcaacttaagggcagcattcgggttgtaatatccccagctgacatccaaaaaatcattggcactgatgataatatcccgggaacaatccaagcaatacaattccttctccgtactgaaccagatacgcccttcgttatcctccagcagactattgatggaattggaaaccagattgtcatctacggtataggcatgcacctctttcccatccggaccaacacgtataaggccttccccgtctgtagccagccaggtatcgccggatgaggactgcatcaggcaacggacaggataatgcagagagatgtctccaaacgtctgatgccactgcgtgtctcccgacttcttatcaaagacggccaacccgctgcaaccggcaatcagtaatgagccccccttacccggctttatgtcacctatgcaatcaatcgggtaatatgtataagtatccgtccgtatatcgtaacgggtaaactctccttcaataccaccgaaccagacataatccccttccgcataaatggcataaacatagtcggtggccattcccttctccggatgtgcatttcttttctctttcttctgtacccgtccggtctgtttatgaatacaatagacaccgataccatagccacctacccagatgtttcccccggagtcttcggcaagcgccaataccactttgccactatattccgtaccgtccagatagtgagtccatttgcgtgaccgaggttgatagaggctgacgccgttgtttgtaccataccaataatctccctccgagtcctgaaacatcacatttacatggtccgacttcagggaattatcattattgcgttcgtgcctgattctatagacatccggcatctccggatccagatagctgatgccattcgtagaagtgccaatccatacaactccggattcatccacacaaatatcggataccgtattaccactcaagcttttgtcatcatccccgttattcatataatggttcaaaagttctccggtagcgacatccatgcaaaaaacacctgcaccgtcggctcccaccagcagcaaattatcctttgtccttgcaaacgaacggataggtacatgaggaatccggtcattcaaggaatgtatttgcccttcgggaccgtcaagcacaaatacgccgtttgaaaaggtaccgatgaacagcttcgctccgaagacatagagcgattccacatgcatctctgtatgcaggtcaaccggcctcgtctcaaaagacgaagaacctgccgctcctgccttcgtcagccggaagacacccttgtcggtgcctgcaaaaaacacttcatcttccatttggactatgcaacggacagattgccccttcaatccggcaaaagacagccctgcactttcttcccaagaataaagccccttcgacatacacaaccacaaacggttttcgtcatcaaacagcatattatacaataccggagaaggcaggtaatcggccaagtccacacgcaattggaaagagtccgtcagtttgttgtatgcatagatttttccattcttcaatgcaacccagacaataccctccttatcacacatcatggtagtggaagactggatattgtccctggaatcaaccattccgtccaacttgtaatgcttgatttcattcccgtcataacgatctatcccgacatgagtatacacccagacaaatccggctgaatccttgtttatctggaatacttgccgactgcccaatccctccttgatacccaaggtgcggaatgaaccggcaaacaagtcagcggacaaaaaaacgaacacccataacagcaaaaatgtacatgcaacggatttatatggaaacggatatggagcagacataggtcatatattgtttttcggatgcaatattacgcataaatataaaaaaaacggtcgaaaaactatccgaataggttcgatttctattacttttgccttccgaaaccaacaaatcatgagaagccatgctcagtaagttcaaattaaaccagctctatttcaaggacacacagtttgccaacctcatgacacggcgcattttcaacgtccttctgatagccaatccttacgatgctttcatgctggaagatgacggccgcatcgacgaaaagatattcaatgaatacacttcgctctccttgcgctaccctccccgtttcacgcaggtttccacttgcgaggaggcgctgacacagctgtcctccatctctttcgacctcatcatctgcatgccgggcacgggagacaacgacagcttcgacgtggcacgatacatcaaaaacctgtatgaacagattccgatggtgatacttacccctttcagccacggcatcaccaagcgtattgccaatgaagacctcagtccctttgagtatgtgttctgctggctgggaaacaccgacttgctggtttccatcatcaagctgatagaggacaagatgaacctggagcacgacgtcaacgaagtgggtgtgcagctcatcctgctggtggaagacggcatccgcttttactcctccatcctgcccaatctgtataaattcgtattgaagcagagccaggaattctctaccgaagcactgaatgcccatcagcgcacactgcgcatgaggggacgtcccaaaattgtactggcacgtacctatgaagaagcctttggcatctaccaaaaatataagaataatatattaggtgtcatcaccgacgtacgcttcccccgcgtagaacggggcgagaaggacggactggccggtatcaagctctgtgccgccatccgcaaggaagacccgtttgtaccccttatcatacagtccagcgaatcggacaacgtagcgtatgcagccaaatacgatgccgccttcatcgacaagaattccaaaaagatggatgtggacctgcgccgtattgtatcagacaatttcggcttcggcgactttatcttccgcaacccggacacgctggaagagattgcccgcgtaaagaatctcaaagagctgcagaacattctttttgctgttccggcagaatcattcctttaccacatcagccgcaaccacgtcagccgctggctctactcgcgtgccatgtttcccgtggcagagtttctgcggcccatcacctggaatagcttgcaagacgtggatgcccaccgtaaaattatcttcgaggctatcgtgaaataccgcaagatgaaaaaccaaggagtggtggcagtcttcaagcgcgaccgcttcgaccgctattccaactttgcccgcatcggcgacggttcgctgggaggcaaggggcgcggacttgctttcatcgacaacctggtgaagcatcaccccgagttcgaagagtttgagaatgcccgtgttgccatccccaagaccatcgtgctctgtaccgatgtgttcgacgagtttatggataccaacaatctgtatcagatagccttgtccgatgccgatgatgacgtcatcctgcgctacttcctcaaagccaagctgcccgaccgtctggtggaagacttcttcaccttcttcgacgtggtgaagtcgccgcttgccatccgttcgtcttcattgctggaagactcgcactaccagcccttcgccggtatctacaacacctatatgattccctatctggacgacaagtacgagatgctgcgcatgctgagcgatgccatcaagggagtatatgcttcggtctacttccgcgactcgaaggcatacatgcaggcaacgagcaacgttatcgaccaggaaaagatggctgtcatcctgcaagaggtggtaggcaaccagtatggcgaccgctattaccccagcatgtccggcgtggcacgttcgctcaactactaccccatcggcgacgagaaggcggaagaaggtatcgtcaatctggcactcggcttgggcaaatatattgtggacggcggcatgacgctccgcttctcgccctatcaccccaaccaggtgctgcaaaccagcgaaatggagattgccctcaaagagactcagacccgcttctatgccctcgacctgcgcaatgccggtcacgacttctccatcgacgacggcttcaacctgctgaaactgcacgtcaaagaagcggaaaaggacggagcactgaactacatagcctccacctacgacccttacgaccagattatccgcgacgggctttatcccggtggacgcaaagtcatcacctttgccaacatcctgcaacacgacgtattccccctgccacgcatcctgcaactggctttgaaatacggagagcaggagatgcgccgtcccgtagagatagagtttgccgccaccatgagccgtgagaaggacaaaaccggcaccttctacctgctgcaaatccgcccgatagtcgacaccaaggagatgctggatgaagaccttaccgccattccggacgaccaggtactgctccgttccaacaactcattgggacatggcatcatgaacgagatacatgacattatctatgtgaagacagacgactatagtgcctcccacaaccaggagattgcctgggagatagagaagctgaaccagcagttcctggacgaaggccgcaactatgtccttgtaggtcccggacgctggggtagcagtgacacctggctcggcatccccgtgaagtggccgcacatcagcgctgcccgcgtgatagtggaagccggactgaccaactaccgggtagaccccagccagggaacccacttcttccagaacctgacctcctttggagtgggatactttaccatcaacgcctttatgaatgacggcgtatacaaccaggaattcctgaatgcacagcctgccgtacacgagacgaagtacctgcggcatgtacatttccgccagccaatggtggtaaagatggatggcaagaagaaactgggagtggtgctgatgcccgaagaataaatcagtctgtcagccggtgcagcacaatcatcaccacctctgcgggggcaaacatgcggatggccttctgcgaagtgccgatgccgttggtgacaatcatcgggatattttttgagttgtacttcagcccggagaggaaccgctgcccgtagtgcgaggggactatcggtgcataaagcccgaacagcgtcacctgcccgccatgcgtgtgtccggccaggatgaggtcggagtttgtcaccgggacgtcctcggcatagtccggcgtatgcgtcagcaggattacgaaatcgtcgggcgaaaggccgagtgtgggcgatatgccgttcttgcccaagtcgaaaggattgcgcacgcccgccacaagaatccgcccgccgccacgccgcagggtgtccaccttatgctccagcagatgcatgccataatgcctcatttcacgcacgatgtcgtcatagcaagcctcgtagtcattgttgccaagcacggcataggtacccaacggcgtcttcacttgcgccagggcagccatgacgggcggcacgtactggcagccttcgtgaaagtcgccgccaatcagtagcacgtcggctttctggtctatgagcaagcggaccaggtccttcaatccctcctccttcagcaggcttttgtagtgcaggtcggagacaaaggcgatgcggaagccctcgaaggcggcaggcacgtcgcgatgcgtgaagtcgtacgtcttaatgcggctgacgcccttataggccgagcctacgtgggtggttttcgatgtgattcttgtacctcgctgcacaattaccttttgtaccggtgccgttttctttatctgctgtttctttaccctgcccttcgccggctggcggcggacattacgcaaatcagactggtcaaaggtgaacatcggcgaaaggcgggcaggcaacccgatagtatcgccaagctgcgcgctgtctgcctgcatgattggctgcggcaacgacacggtaatcacccgcttggaacggcaggaagacaagagcagcagagaaagaatggatatgtagactaacttcttcatcataagtgggtgcaaatatagggattttcagtatttttgctggcagatgccgaactaaattggaactacgatgaacgagattaaacagaattcaccctacgcatggtttctcgccgcccgccccaagacgttgacgggagccatcatcccggtattgctgggcagtgcccttgccttcagcgacggacagttcaagaccgcacccgccctgctgtgcgccctctttgcctgcggcatgcagattgccgccaactttatcaacgacctcttcgacttccagaaagggaccgaccgtcgggaagaccggctggggccgcagcgcgcctgcgccgaaggttggattacgccggcagccatgaaaaccggcatcggcatcgcactgacactgtcgtgcctggcagggctggcagtgctgttcaccgtctgggggcagctgccccacggaggctgggaactggtggtgctgggcgtggtgtgcatactgtttgctttcctctataccacgctgctctcctatcggggctggggcgacgtactggtgctggtgttcttcggcttcgtgcccgtatgcggcacctactacgtgcaggcctatacgctgaatatggatgtggtggtgctgtcgctcgtcagtggcctcgccatagacaccttgctgatggtgaacaactatcgcgaccgcgagcaggatgccgtgagcggcaagtgtacgctggtggtacgctacggcaagaagttcggtgagaatatgtatctggcactgggcatcgccgccgtgctgctctgcttctggtttgtctacacgggcaagctgactccactggaatttatctgggctccctgcgtctatctctatatgcacgcactgacgtggcgtaaaatgatacagataggtagcggtaaaaagctgaacagcatactgggcgagacgtcgcgcaatatgctgttcttaggattactgttagcggtagcgctgaattgagaggttagaggttaaggattagcggttagaccctaatccctaaaccttaacctctacctccatacatctgttcgtaatacttctgataatcaccgctggtcacttcttccacccacggctggttgttcaggtaccattcaatggtcttgacgatgccgacctcgaacttcgtctccggataccagcccagggcattggtaatctttgtggggtcgatggcataacgctggtcgtgacctaggcggtctttgacgaaggtgataaggtcttcgtttatccagctgatgtcaatcgtgccgtcggcggcttttacttgtttcttcagcactgcacggtaacggggttcttcctccatcaagcggcggacggtggcaatagtcagcttcacgatttcaagattggtcttttcgttgtgaccgcctacgttgtagacttcgccttccacaccctcgcggacaaccaggtcgatagctttgcagtggtcttccacgtagagccagtcacgcacgttgctgccgtcgccatagacggggaggttcttgccttcgagaatattcttgatgataagcggaatcagcttttcggggaagtgataaggaccgtagttgttggaacagcgggtgatagtgacgggcatcttataggtatcgtgataggccatcactaccatatcggcactcgtcttgctggcgctgtaagggctgtgcgggcagagcggggtttgctccgtgaagtagccttcggcaccaagtgagccgtaaacttcgtcggtagacacttgatggtaacgaacgcctttgcgccaagtgggataaccggactcgtccttacccgtgacccaggtacggcgggcggcatcgagcaggttttgtgtacccaggatgttggtcatcaggaaaagctggggattctctatgctacggtctacgtggctctcggcagcaaaattcactacgtaatcgaatttatacttggcaaacagttcgtcggcaagcacgcggtcgcagatgtcaccttttacaaaaaagcaacgttcatcgtcaatgtcattggcaatggtgcccagattgcctgcgtaggtcaaggcatccagtatcaccactttaatatcattatgttttgccaggatgtatttaatatagttggcgccgataaaaccggcggcaccggttacgagataagtcttcatgagaattaaaaattataaattaaaaattaaagtcagcgggcctttataggagaactattctccttctctttttggggaacaaagagttcatcgcttcgattcagccagttccatcaggtatttgccatattcggtcttgccaagctgttcacccaagcgatacaggcggtctacatctatccagcccttgcgccaggcaatctcttcgatacagctcacgcggaagccttgacggttctggatggtggcgacaaaattgctggcttccagcaggctgtcgcagttgccggtgtcgagccaggcaaaaccgcgaccgaaaagctccactttcagcgtgccctcgtccagatagagacggttgaggtcggtaatttcgtattcgccgcgggcagagggcttcaaggaggcagctttctctgtcacggtggagtcgtagaagtacagtccggggacggcatagttgcttttagggttggcaggcttttcttccagcgagacggctttgccgttggcatcaaactccactacaccgtaggcacgggggtccttgacgtaataaccgaagatgcaggcacccttgtctatggaagcggcacgcttcagcatggcggagaagccttgaccgtagaacatgttgtcgcccaggatgaggcagcccggtccgccgtccaagaactctgcacccagcacaaaggcttgtgccaatccgttgggattctcttgtatcttataggaaaaggacatgccgagttcttcgccggttcccagcagttcgcggaacatgggtaagtcacgtggagtagagataataagcacttcgcgaattcccgccaacatcagtgtagagagcgggtagtatatcatcggcttgtcgtagacgggcattatctgcttggagatagccttggacaacggatagagacgagtggcactgccacctgcaagaataattcctttcatatttcagttctttttcggtgatacttcaaaatggagaataaaataagaaggaggacgatgccccacggctctacttgctattcgggcacaaagataatggaaaaattcgattaagtgaaggcttggtttcatctttttacttcattgctttgcttactccggtacattgttttgcttacttcagtgcgcaacggccgtcaccccttgatgaaacggtctttacctcagcgtgtaacgacctttaccaaatagtgtaacggcctttacccaatagcgtaacgacctttacattagcatgtaacggcttttacactatagcgtaaacaatcggtaaatacaatccattgaaaataaacaaactacatcatcggtcagcaagttctatcacctccaaatctttaaacgttcccccatcaaccgcaaagcgtaccatcgtacgcaccttatggaaaccttgaatgcccgcagcgcccggattgatgtggagtacatccaacgtcttgtcatacttcaccttcagtatatgcgagtgcccgctgatgaacagctttgggggacgcaccagaatgctgcccttgatggaagggtcgtagttgccgggataaccgccgatatgcttcatcagcacctctgccccatccaccgtgaaacggagaatctgcggatagagctgccgtatctcctgcccgtcaatattgccatacacggcacggaagggacggaaagccgccagcttctgtgccacttccagcgaaccgatgtcaccggcatgccatatttcgtcacagccctcaaaatattgcaggtacttttcatcccagtagccatgcgtatccgataataaaccaacttttgtcatctttcctttgtttattaagacaaaggtaattatatttgggaagaatacaatgtggtaatgtgctaatatgccacattaacaccttaacaccatggacaacagatatttcaaacgtgacatcagctggctttccttcaactaccgcgtactgctggaagcggaagacgagacattgccgctatacgaacgcatcaactttatttctatatactcttccaatctggaagaattctacaagatacgcgtagccgaccataaggccatagccaccggagcctcgcaaagcgatgaagagactatgcagtctgccgccgaactggtagatgaaatcaaccaagaagtcaatcgccaactggaggaacgtatccgcatctacgaacagaagatactgcccgccctgcggaaacatcacatcatattctatcaaagccgcaacgtagaaccgtttcaccgcgattttgtgcgcagcttcttccgcgaagagatattcccctatctggccccggtgcccgtaagcaaggacaaggtgatttcattcctgcgcgacaaccgtctctatctagccgtacggcttcatctgaaaggagctcccgccagttctccaaaccgcatccagtatttcgtgatgaaactgccgtacagcaaagtgccgcgcttcatccagctgcccaaggtggggaaagactattatctgatgttcattgaagacatcatcaaggccaatctggataccatcttccccggttatgaagtggacagcagttattgcatcaagatttcacgcgatgcggatattctgatagacgatgccgccaatacctccgaaatcatcgagcaggtgaagaagaaggtaaagaaacgcaagataggcgccgtgtgccgttttgtatacgaccgcgccatgccccaggacttcctcgactttctggtagatgcctaccgcatagaccgccgggagctggtgccgggagacaagcacctcaacatggaggatttgcggcatctgcctaatcccaaccaaagcgtacgtcccatcaagaaaccccagcccatgaagctgacctgcctggacgaacgcgaatccatcttccgctatgtggagaagaaggacctgctgctgcattatccctaccactccttcgaccacttcatccattttctatatgaagccgtccacgaacccaccgtgcgtgaaatcatggtgacccagtatcgcgtggcagagaactccaccgtcatcaacaccctaatagccgccgcacagaacggaaagaaagtcaccgtctttgtggaactgaaagcccgcttcgacgaagaaaacaacctcgccaccgccgagatgatgaaagccgccggcatcaacatcattttcagcataccaggactaaaggtacatgccaaagtagccctcgtgctacgccgcgacaaggaagggcgcaaactgacaagctacgcctacatcagcaccggcaacttcaacgaaaagaccgccaccctctatgcggacagcggactattcacctgcaacccggtgattgtaaacgacctgcacaacttgttccgtactctgcagggaaaggaaaatccggtgttccaccgcctgcttgtggcccgcttcaacctgattcctgaactgaaccgcctcatcaatcacgaaatagaactgacccggcaaggcaagcaaggacggattatcctaaaaatgaatgccctgcaagaccctgccatgatagaccgcctctacgaagcctcgcaagccggtgtagagatagacctcattgtccgcggcatctgctgcctcatccccgggcaggagtacagccacaacatccgcgtgacacgcatcgtggatacctttctggaacatgcccgtgtgtggtacttcggcaacggcggcgcacccaagctcttcctcggctcgccggactggatgcggcgtaacttgtaccgccgtatcgaagccgtcacccccattctggacccggacttgaagcaagaactcatcgatatgctatccatacaactgtcggacaaacggaaagcctgctttgtggacgaccggttgcgaaaccgctggaagtcgtcgcgaccgcaaaaggagaaggtacggtcgcaatatagcttttacgaatacttgagagagaaaatataaacaactctgccccaatacacctccggctcaactgtcttttataggacacagacgtacggcagttcctccactacgtgcttgccgaatggtgagggtatcactataagtcacttcgcgctcttctataagtatagcagcaggacatgtctcataatcggcctcaggagcatcacgataaatagtagccagatatcttttatctgtatcgagaaaagacagactgatattagccgttcgttcctcatctcccgtgatgctgcctatataccagcatccctctcctttaccacaacgggcaatagtaacataactgccaatgcatgcttccggcaccactgttctgctccaatctgtaggacaagatactataaaattaaaaggttccggattagcctcgtaattctctatttcatccgaagccatttgtaacggtgaatagagcaccacaaacagcgccaattgtttggccagtgtggtatgtacacgtgtctgtggcattacatcgttaacaaaccgaaacgtcaccggtgtaaagtccatcgggcctgccaacccacgagtgaaaggcaatattacggtatgagagggaggatttccaccatctacatcccaagcgtcccattcttgtccacgtactccctcttgtgtcatcagattaggaaaagtacgctgcaaacctgtaggaatcaccggttcatgattatcaatacagatacggtgacgggcagcagcctctattaccttgcgataatgaagtacaccaaactgactgctatgatattctttcccatcaagcaaatcgcccacataacccgtttttacttgatgcacaccatatttctcatagaacttgaaaccatcttccatctgattttcataattggaaacattaccgccagtttcatgatgtcctatcaaagctactcctttgctacgcccataatcagtaatacgttgtatatcaaaatcggtataaggttttgtgaaactaaacttccaagtagcccagtcttcattccacccttccaccagtacacctcccaggttattggcagcagcaaaatcgatgtgacgcattgtattctctgttgtggccccatgatggggaccggcatgccaggtgttatgcttcatgtgataagtccaccaaattccaatatagcgcataggttgtatccaggaagtatcggttatacgacaaggttcattaagatttaacatgagacgggaaagaagcaaatcaccggcagattcagccactatcattgtacgccaaggagatacacgggtatcggtaacacgtactttctcacctgtactccaaggtgtaagagccgcacgtaatgtaaccgttttattatcttcaagttgttcaaccggcctcaagttcatggcagcataatctgtaagatttgcttcatgaatagccaaataaaggctatctgttgtctcaatcgtcaccggagtgcttacccatcccatcttactaagagtttttttctcaaataaggcctcgtaaaaacgaactcctttcactggaatactccaagcatcataatctgcaggaaaaacgaattcagtcacttcgtcatcaataagaaactcttgtagctgttgctggcgcgggaactcataccggaatcccatcccatcatcaaaaagacgaaaaataatattcagttctcgctccaacgatgtttcttccttgaggcataccctcaattcattataatgatttacaatttcagcctcttccccccatactggttgccacacatcattatgcgaatcatgcttaacctcttttagaacgaaaccagtcaaaagatctggcgcatccttcaaaaccaatcccagacgtgaaggaagtaaaatattcttccccgcatgtcttaaacaatatcggggagcaccttcttcatcaagtgtaaactctaaagaaagttttccatttggagaggtcaacttgatatgttcctgctggcatgaaatcatccataggcctaaacataaagcaagtataatctgtagcgttttttttagtttcatagtcattaccgaatttaattttatatatccaattcttattttataagtctactgacaaacagtccctttccttcctcagccggaataacacagaagtttacgaaaccacagacagactccggttcaagcaacgtggcaaccaaatttcctaaaggttgtgccaaaggtaccaaccaactacctattggaagttctacattatcttcatagacatccgtttctacatttaccggatgaatcccctcccattccttctctgcacgatacagacgggttactttgtaacgctcaacttttgctttttgtacacgggtaacttgctcaatgtgtacacccaacgctcgaagcttacatactgcttctgtacagggagcatcgagcagataagccttagggcgagtacgcatcaattgaggtgttgcctgcatggcatcaagggttggcagttcagtcttaaacagttcattggccttataatcgataaaagagactacatgacgtacagtatccgaagtgaaagtaacatatatcggttcagtagctttcaaggtgcgcttcctggcttgttctatcttacgtttaattgaagcacgatgttgcgcagcagtaaccaacgtttgccgtgccaccaagaaaccgcactcactacgacgtgcaaaacactccggtcccaatccaatacctcttatttcgacaaaaagcgatacagcccccgtcaatgcttgaaaagtagaactggactgcggacttttggcaccttttacaagaacaagggaaccatctgccacacgaggagtaaagtagaaaccggaagcataaccggcactatttaaaacgacctctgcctcacgacgaaaaagttcttcagacagcgtacgtaaagctaaaggcgcattaagatgtcctgtaggtaaaaaaagtacatcagcagcatttgctgtcggcactccacgtaataagttaaactcacgacgtaaaggtgtatattcatgaatatcaagagctacgtccggattccattgctgataggactgcttcaacagcaaagtgacagcatcctctaatttgctctgatcgcgattcaaatcgtaaccatcggctgaacgacgttgctgaatggcataaccatcaacattggctataggaaccaaagccacagctatatgattcagcaattcacgtccttctttttcacaaagtaagtaacggacaagcatgcatacagcctcagcacctgccggctcgttaccatgcagtgccgcttgaatccatacccttaccttcttcttgtcgggagtacccaaataaagtaccggaatggtacgtccttgtttggtaacaccaatattctccatatatgccaaacccggagaacgtacaaccaattgttgtaaatagtcctttatctcatcaaccgatgccaatccgctaccgtaaggtttacttagagtaggtgtctcacggtcaaatttggggtcaggatagaaacttgcagttactccggcaggttgcttcgactgatttctattccataacacaagattagctaataccacttcttgtgctatcctctgtaaataaagagccgtttcagacggtagacctgcataataatcgctgctaaaaggctcaccaaaaaaaattgcataaaagacacaagccgccagataactgcctgcaggactagggtggctgccatcagaattatacaactgcaaacttggacactctctacgtacacgtctccatgcctcacccacaggagcacaataagcatcaaggacatcagccatttccaaatagttttccgtaagttgctgctgcattccttcataagtatcattattacgcccccatgtcatataacagacactttttccttttggggcataaagacggagtaaactatctaactgcgccgcaggatggaatacattcttctttacccattccttttcacgagtaggtgccttgctctgttcctgcatcaccatataatcccatcctccttcacgaatcgcctctaatgtttgcgtattggctgcatgctgtctcaagtaccaaccagggttagcaacctggcgcactgatattttttttccacatgaggatgctaacgattggacttgccatggcaaacgattaaaaaaagtatagctgttacctataaaaagtacccgtaaagaatctgtcgtcaataatggcacagcttgtttccccatagggacagcctcatgcccgatgccgcactcttctatcttgcgccaatggcattcccaaccacgggatgcagccaactggtgaatataaagccagaaactacgcccacgctccatacggtttcgtccttgtcgttcagcttcaggagtcttgcgtagaaaagactcacgtatcgtatctcccaaagccagctgtagtatgataggttttgacaagtatttttttatctgttcagatgaaatataggggataccagccgtaccataaggatatgtctgggccaaatcaggaaaagtataccaaccgggagaacttataatagctttttccacataaggactatcgtgaaaaagcatgaaacgctgtacgaattgcccaccagcagaatgaccataaatcatatatcctttgcgcatgcttcccgtaaattgacgcacatattcaaatagtttatcaaccaacactggtgtaattttttcgggagcattagctactgtatgggcagcattcatcacccccacctcctgatagtctgccaaaggataagatttcaaatcaaagtgaggtataaaaagcataaaaccctttctctccgcttcttctttccaaccgtccaaaagataacgatagccgcggtctcctccttcaaagacaaatacaataggcatttgtttaatatccccctgggaaggtatataataatgtacatctaccgggcgatcggcaaaaggagggtattgactataagtgaagaaatgttcacctcttggcctttccaaagtctgtttcgctattgcagataaacaaatacagaggaatccaatacaaaatataatcagcttcttcataattcgtaccttcccttctttactattgtaccatcttgcattacaaatttaccacgggcaatgacatctgtaagctgcaaatcttccgccaaaaaacacaagtctgcatctgctccttgtgccacaatacctttagctcgtaatttcagattacgagccggattggatgttatcaatgtaatcgcctgttccaatggtaccccctcctcattgactaatgcaactacctccttgaaatttaaattcaaaggagcaggacgataagttatttctccagtttcaggattcactctgcgtacgccaccatggccatcactagaaaaagtaatgcgatcaagggggacaccagctcgcaatgcacgtatcacacaacgatggggagtatcaaactttgagccaccagtcgaaaaatcaatcattccacctaatttaccaaattctacagcctgcataaaaagagcttcagtacgtatcagatgagtaggagacagataagatatcagtgtaggatagtgacgagcaatattgagtaagggctcaataccttccggaagtgctcccaaatgaatgtggagaattcctcctttaccagatgtaaatccccctaaacgtacctgatgtataatacgtaatatctcttgctctgtcggaaacggactacggtcatcactcatcgccagcttacagccaataactttatctatgaagataagatcgtcagccacactattcatcaatgttttggtaggcaatccgtaataacttgtcagcatataagccgacaatccgtcatcgtcaatagctttggccttggcataaagcgtagtaagttctttggcaaatccatcagtaccaagcatacccaatacagtagtagtaccacatgccaccagttcgctcatagtcacctcggggactaatgaggcataaccttgttgccctcctccaccagtaatatgtacatgctgatctataaatcccggagtaacaattttaccttgcacgtcaatagtatggcaaaatgattcattcagttcaattgtctttgaaatatgcgcaatcttttctccgcatagcaaaatgtctgttttaccaagataggcaggagcatataaatttgcattctttatcaatgtaaacatagctgtcgattaattttagaaagtgataagatgataaagtatcaagaaaacaattcctcctattaaaggaaatgtattacgccttgccaactccactgatgacacaccggctaccccggcaatggcaacaatgactccggcaataggagatgcggcacgtcccatgcttgccgccaactgcaaaggaagtatcaatgaaaaaaccggcaaaccaagctgagtggctatacccggcaataaaggaccaaatgaaaaaaaggctgcattgccacttcccatcagcatggcagctccaaaaataatgagagtaaagattgcggcaatagctaatcccgaaagtccgatatgagaggaataacccaccaatgaatcaataaatcccaaaccaatcagtcctttagagaaaacttctgaagctacaatcaatgttacaactgaagtaaacacatttcccatgcctttccaaaaacttgcaaaaacgttaaaaatagtacgcacactacgagtatgaaacaacacaaataccaatgataagaacagagaaaaaagcatagcagtagtggtacccaatgttacagtaggctgaaacagtcccacaaaaggtgaaaagaaaatgagaagagccaaaggtaataccgggagtagcgcaaaagccaatggaacatccggtttttctactaatgaggttgcagtcacatttgacacctgcaatatgccatcctgctgtttctttgcatcttttttatcaaaataacggttattgaaatagaagagtaccattacaaccaaggaagtaggaattactaaaggaagttgatgagtgatgaaatattccacattggattgtcctatcaattcggcagccatagcagtatttgccgaccccggtccctgatcaaatagagtagcagcggcaatgactgacaatgctgtaagttggcttactcccaaactaattaaaacaggataaaccgaagccacaagcaacaatcctaatccggcagctgaaggagtagtaataaaaagtaattgtccaataggaataactatagtagccgccaaataaggataacgtcgaaaaagacctaatggcttcatggaaatatagaccaatgcattagtagcctttatgttattcatgaaagctacataaccgccaattgtcattatcataaaccctgcacgcgccaaattagaaagaaaaacttcctctatcatccttaccaaatcaaacaccaccattcccgtagcttcactaggtactaccgaatgcacttgcatgaaaaaagcagctgtaagcattaataaaccggaaagcatcaaaagaccttgaggattgagcttacgataaagacctaccgctgtaatccctaccataagaagactaaaaatgaaagccaattcggacatgatgtatcaagatattaagtttttgttttcttttgaatatatgaatctaaatcagatataaacaccgatatatacaaagccgttttatatgcggtatttatatctgactattatctatcaataccccggattattttccaaaggattaccagtattggcatcaatgaatgattgcggcagcgggaaaaggacaggagtttcatattcatccataccacgtcctgcaataccagctatctcattgagttcacgcatgcgacgtttgaaatagttattggtatcacgttcgtcaccaccattttcttggcaaacacgtaccaatgtatgacgacgttcttcctccgtaagcagttcacggctgcgttcatcaagaatgaaatccataccaccgattctaagatcatcttcagtaatacttacagcattggaacgattacgtactttatttatccatttaatggcctcacctacttgattactcttgtaaagagcctctgcataaagtaaatatgtatctgccaaacgtaaataaacaatgtccgcatagtgtccatcattagctgcattagccaaaataggtggagtataatcccatttacgagtagtaggccaatcatattttttaatggaagtagaagttagcatggctgcattaaccgtagtatcaataagtgcagtaccacctaaatcaaataccttggttacattgccggcagcatctacatcattaatactccatacgatagcattggcagatacacggtcatcttgttctcccattcctttataattgtacaaacgaagtgctcctctggaaggaactacacgtccggctcccttaccaccattagcttgccaaaaaacttgtgcaaatgaaccttcaccaccgttattgatatagtccggattatgctggtttgtctttttacaatcgccatcattagcataatagttcttataagttgtagtcatatagacatttgcagtaccataggcactattctcctcttctgtgttaatgaaagccagtagcacctccgtatttccatcagcatacataggagtataaaatacgtcaataaaaggacatccatcattggaagcattactaccaaagcgttgatttataagggaatattctccactttccactaatggtttcagtactgaaactgctttttcagcattaccttctgccaaataaagttcacccaaatagtgacgtgctacagcaccagagactttactattattagaagtacgcaaaggaaggttatcgactgcaaactggaaatcttctgccatcacttcgcgaatactactcaaggaagcacggtcccaatcatcacgataattcaatcctgtaatttcttgtgttgaaaggggcactgcaccaaatgaataggtaaggtgacggtaagcccaagcacggaagaagcgagcttcggccaacacctcatttttacgattttcagcatcagcaccacttccccagttaatgccatcattgtcagctcttgagataaccatattggcagtgttgatgatacgatatccccactggaaaatattattccaaatagcaagatcagtgtaagttatctctttgggattgtagaggaacttcatttccgcatgactattattggcccatgaattatctacccctccaccccaggcagaatgcagacagagcgcaatacttcctcccattgcatcagcacggcgatactctgcacgcataagaccataaagaggcgttatcatcgatttaaatccattgtaatctacaagtaaattttcaggataaagtgcatcacgaggatcttccttaagaaacttatcctcattacagccgcccatagtgagcaataatactgtaaacactaagacattgaaatatgttatttttttcatatgtgcaatttcattttagctttttatgatatattactctcatcaaatatctaactttagtccaaaagtgaacgaacgtactggaggagcagccaattgatcattgagaaattccggatccatacctgtccagccagttattgtagccaaattcttaatgttcatgtaaagattgagccgtttgatgaaagtacgacgcaaccattgttgtgggaaattataacccaatgtaacgtcggaaatacgtaagaaatctgtcttttcatagaaactggctccctctggattcacatcactattcaaactatttttcggatagctattcgtaggattctctggagtccaaaaatccaccaaaaaacggttctggcgatatgaattatggcttgtatcatacaaggcattcagatgggtttgtcctaactgagccgttaagaacacactcagagtgaagtttttgtactcaaaagtgttcatcaaactcatatttactttaggaatagccgaccctataatagtcttatcagccgttgtaatatcgttaccatctacatcaaggtatttcacatatccaggatacgaattacgatagttaggatcttgctgccctgtcgggttagacggatcagcaatctgccatacaccgataattttataatcatagttcacattgataggttcaccaataaaccacttggaagccacatcatcaaccggctttccattagcatcatacaaaccaacatctacaatctccgaacgatagtgtgagaggttgaaagaggtgctccagcgaaaactcttatgtgtaatgttattagaagttatctggaattcaaaaccacgattacgggtctgtccacgattctcagtaatagagccagtaccattaatggtaggaatagaacgggaaagcagcaaatctttggttttagaccaataaatatcaaatgaactctgaatacgtccattccaaagtgcaatatcaaagccagtattaatagatgtagtagtttcccaacctaaaccgggcgaagctaacttcgacggatagaaaccaaactgtgcagtatgatcatcattcagataattgtaagttgaaagattaggtagtgtactataagcactgatagcctcattgccatttttaccccatgacaagcgatatttcagattgctaatggtttcacttataggcttgtctttaaaaaaagattcattggaaatattccatccaatagcggctgaaggaaaaacgccgaatttagaactttcaccaaaagcggagtaaccatcacgacgagcagtaagagttaacaagtaacgatcatcataagtataattcaaacgccccatttgtgaaatatgattttctttataataattggaattaccagacattgtggcagctttagaaatctggtaataatacatcacatcattgggaaaattcttaccttccattgtattctgttcatattccttgctttgagcagaatataatcctgtgaaaaatatacgatgtttgccaaattcacgttgataagaaataatattctccaaaatccattctcctgaatgccagtcatcagtattcaatacgccattagcactagctccttcgtaggtatccaaaccttgataattcttataggagctgttttggtaagtgaagcctgtattcaatttatagctcagccctttaataaagggaaactttacctcaagcacattattagtgataacctttgcacggatatcttttgtcttattattaagagatcccaacggattaatgctgaaagctgaagaggagtcctcagtagcagaaagtgtaagtgaaccatcctcgttataagcacgtcccaacggaacttgttttatagcccgccaaaaagaagcactgctaccactacgatcgtagcgacctaactgtgtagtagtagaaaatttcaaccaactattaaactcctgatcaagattgaaacgtatattataacgcttgaactcattgcctaccgcagttcctttcacatccgtatagttcaatgaaatgaaatagctggttttgttagctccaccacggaaagaaaggttatgctgttgttttataccggtctgtgttgccaacttcatccaatcagtactctgaccggcagcatacatagctaattcagtaggagtaaagttatctaaccaaggttcaggattctcttctgtaggaggagtagtattggtagccttgaaagcttcagatttatacttatagaattctttgccattcatcatacgaggtaaattgataggctggtcaatagtaacataagtatcgtatgataccgtcaatctgtctttcttaccgcgcttagaagtaataaggattacaccgttagaaccgcgagcaccataaatggctgctgaagaggcatccttcaatacttctatactctctacatcattgggattgatttccgaccatggaccatcaaaaggtattccatcaagaataacaagaggtttattatcggccgtaatggagttgttaccacgaatacgtgtagtagtggacgaaccttcagcattactacccgtcacactaatattcaatcctggaactgctccttgcaaagattgaatcaaattagcttgtgggcgactttcaagtacatccgagttaactgaagcaaccgaacctgtaagatcacttttgcgctgtacaccataacctactactaccacctcatccagtgcctggttatcttctttcagtacaatctttaacgatgatgcgtctttcacctgcaatgtcttggatatatacccaatgaaacttatctccattaccgcccccttagtcactgaagcgagtttaaagtttccttctacatcggtaatggtgcccgtacccgtaccttgtatcactacattggcaccgattatcggttctccttgttcatctgtcacatttccgttaatattccatgtctgtgcatgaagtgagcttgaaagtgacagcatccacataagacagacaagcaaaataccacttgcgtctctcgatttttgtctggttttcataaattacatttttaagttaataggaacttgtgtgtaaaaaatctgtaagtattcggccaactacaggtattaaacctttatatacaacaatagcgactgtcactatgaacctaatagtatcagccgctattgttttgttgaacccatatgttacaatttatatcagttacaagattcctccttttgccttgtcagtacacattccggatgtttcaacttccatttatgtggaagtagattcaaaagttcttcttgggttgcctttttgtgataaggcatttgtgcgataacatcgttcaggtataccctgggatttaccccgtgcgccttacatgtggccagcagagaacatatgacagacatattaaccgcagcttcgtgattaccacagaaaagaaaattttttctgctcagagtgatgggccgttggacattttccgccagattgttgtcccagtacaggcggccatcgtccagacatctcataatattatcccatttggtataggcatatgttatggccttgcctgtcaaagaacttggactgtatttaattccttctgtctccatccataccttcattgcctccatgattggcctggacagttcctgacgcgtctgtctgcgctcatcatatgacaggccggcttcgtcacactggcgttctattttatagacatgctgtatctgagtcagtgcatgttgcgccatctccctgttttcatccaaagcctgctcaaaatgacggcgtatatgcaccaggcagttgagtagccgcacgtcggggttggtcttgaaggctgtttcataacctgcaaaaccgtcacattgaagatatcccttgaagttatattgatttgccagggattcgatgaccgctccggcccgtgatcccccgtcgtaatggaagatgaccagtttctccatgactgatcttaccatccagagatattccttgtcggctctgtgtttttctctgttaatgaccggaactgtagtttcatccgcctgtacatagtcacaggagaagacttcccatttgagttcttcatacagaggcttaagcagttccacggttttcttgaaccagccgtccagtgtactttcggtaaggcctttcattccaagatggcggtattgctgtatctgacggtagaacgggacatgatattcatacttctgaagcagtatctcggtaagcaggctggtgtcagcaatgcacttgtcgaccggcatcagcggcatgggagctatctctacgcctttctgtccggctggaggaagcagggtactatccttgagagcatatttgggacggatgatcaccttgacgtaaagcattcccggcttgtgtttgacgacttttgttatctcttcgcctattctacggtataaagacaagtctacgcctttcggttctattgtatcggtttccaatacgggcaagtcctctatcattttgcggttctgacgatttcgttttacgtcttccaccgattccttctcaatcttttccacagcctcgtcccgcttttcttccgcctgctgccggagtccggaaaactcgtcggcaaagaggtctggcatattaggatcatatacgcgaagtttctctgatttacgaccaaagagctgacggttcagccatgcgacctgagccgtcaactccttgatacgttcctgcagattttttatctgttcggattgattcttattagtagtagacaatgaggctatagaggcattcagcccttctatcgtcttgagtaaaatttctttttcttccattgtctatacttcttttaatgatgtaaatatactaattaacagtgaattatgcaacaatatccaaagtttactcacgcaaaaaacatgttatacatggtattccttacgttcggctcttaaccgccggagcctctgttccgggttttcctgtattccttcaaccatcatcaccagatcgcgccactccatgggatagctgtttgatttgggatcatactccggcagcttgaagcgaccggcctccaaacgttttacatacattaccatacctccgtcttcggcatgaaggagtttcattagtctgcggctggaaccgatgaagatgaagacatcaccgttcctcacttcactgttcattttctcatgtaccactccgcatagcgaactgatacccttgcgcatatctgtcctgccaggacacaggaagtagcgcatcgtgtcgttcaggttaaacatgaccgtctcgaagactttgggtaaatatttccttcagcaaatcttcagaaccgctcccgaagtgggcacgaagtccattgggaaacagcagcgcaacaccatgcggcaattgttcttcttgggaagactccgtaaatgcctgtttaaaactgataggagccaactcgtgtttgatactgctcctgtcaacggaacattttctacgccagtagtgataggttgaataacttacacctatctgttgaaggtacgacttcaacggcagctcgctttgttgcacctgcaattctaattcttcaaattcttgtctgttcataataattgaggtttgattgtattcactgccgcaaagctacaaccaaacctcaaagtgtaaaaggtgcatttcttcgaatgcttactaaaatctcgagagcaaaattagacaatgtaacaaccgattatattcactggtagaggatttggtaaattcacaaagttatatattgctgattatctttcaattacagacagactcaatagattttcagtagtgatttaaattaaatcggtaatcaaaaacatgtatatagataattgccattcgatagtattaagctattgaatggcaattatctatatacatgtgggtaaaaaatgagagaaacgctcagtcttcaaattactttttacaaacctctttcacagctcgaagaaattcctccttactgagcgaagatttatttaaagttatagaacgattattatatacggtttgcagtgaacagtgcaaaaattctgcaatcttctcactatccgttacccccattcgtatcaaagcatgaatacgaagttctgtattaagccgcccagacttcacttcaatatgttcttcgggacgtagcaaactattgaagtgctctacaaaatcagggtataaatgtagaataatggaatcaaatttctcataaaaatccttcatttcatcgctcatggtagaagtagaactaatcatcttctttaaatcttcaagttgcccagcctttaatttacggtttaactttttacgatactcctccatacggcaaatataggatgaacaaagtttgaatacctgaccaatatactcctccttaatataatttgtgtcacgtagaaccaaattgagcttttgcagttcactattaagactcttcaatctaccattggccacatgtagctcaaccaaagctttcctacgtcttcttgtttgccttctcaaaaagaaaagagctatcagcaatacaatagtaagaaaactaataaataaaaggaatagctttagctgcttctgttgcatatgatcacgttcaatgtagctttgatgtatccttctctgcaacttctgctgatgaagcagtcgtacacgactcttaaaagttataccgatatcagaacaataagtactataacgataggctcggtccaactgaccttgttcatataaataggaagccaatgcatataacgaaccaatatcacgattcacagcatatacatcagcaatacctgagagaatcatattttccagccacttggtatggttgtgctctttttcataaagtagagccaagttataagctaaaatagaataattacgactattaggtagaagacgttgtttttccttttccaactcatccctaatggcaatacgttgtgcaccgggaacatcttgatatttccacacacggctataaaggtagcgtggttcgtcaggagtggccgtctgcaatactgaatctgaatataacgcataaagttgaccataatgctcatgtaatgcatcatcacctaatgaatagagttgcaaccgcgagcagagagtacgcatctgaccataataacgcgaacgtaagtagcgaggcatactggaagaacagagtgaatgcattacttcagaggcttgactaagcaagccattagccgtataaacaaaaccaatacctaataaagattcaatctcacgattcttatcatgatattgtcgtgctaaatcaaggctttgtgtagtatacttcatagccgaatctgcatcatacacacgatattcttgataaatagcctgattaagttcatactgtttctcaaatgccttagattgtcttagtgaatgcttcaacgcctctattcgctcctctttctgcaaaataagtttatcagaattatctatcagactatctaattgagtaaacaatgcctcatttgccttagcagcactatctgagatatgctgcttgcatccagcacaaaaaaacaaatatagtaagaagaataggtttaaacaaaaatggtttttcatatttctatattcgttggtagaattcatttatttaataaatgaattaaaaaagttacatacatctttgatttttaatatcaaagttctaattacaatcaattctacacacaacttgtatgcaatattcgcaagaattctcgacatctgcaaacaattaactagtaatttggctgcttaacatagaaataaccaaatacgaaacacaaaagcatccactcttctattatacttatattgttactcttaaatgcttaacattaatgattattaggagaataagagcaatcgctcttaacacaataccattctattccaaaacatttgtaacatttctgtaacatgtatgacatttccctgcaacaccaaactctttcctttgcagccggaaataaaatacatgtctatggaaacaatttatctgggtatcgtcatctttctgttcgtactcgcgattttcgacctcgtggtaggtgtcagtaatgatgcggtcaattttcttcagtcggctgtcggagcaaaggcagcatctttcaaaaccatactgttcattgcaggcattggcgtcttcatcggtgcggcactcagcaatggcatgatggacattgcacgacacggcatctatcaaccggagcacttctactttgccgaaatcatgtgcattctgcttgccgtcatgttgacggacgtcgtgctattagatgtcttcaacactatgggaatgcctacctccaccactgtatccatggtgttcgagctgctgggaggtacgttcgcactggcgctcatcaaggtctataacagcgatacattgggactgggcgacctcatcaatacagacaaggcgctgtctgtcatcatggccatttttgtatccgtagccattgccttcttcttcggtatgctggtacagtggctggcacgtatcgtgttcaccttcaactacaagaagaacatgaaatacagcatcgcgctgttcggtggtatagctgccaccagcatcatctacttcatgctgataaaggggctgaaagacagttcattcatgactcctgaaaataagcaatggatacacgacaataccgcattgctgataaccggtttctttgtattcttcaccatactgatgcagatactgcattggtgcaagataaacgtcttcaaagtagtggttctgatgggtactttcgccctcgccctcgcctttgccggcaatgacttggtgaactttatcggtgttcccctcgcaggatattcctcatttattgactatacagccaatggtacggccgccggccccgacggattcctgatgtcctcactcctcggtgcagccaaaaccccgtggtatttccttatcggtgcaggcgctatcatggtctatgcactctgcacatccaagaaagcccacaacgtcatcaaaacttccgtggaccttgcccgtcaggatgacggtgaagagaacttcggaagtaccccgatagcccgcacgctggtacgcttcagcatgaccctggctaacggaatatccaaaacaatgcccgaaagcagcaagcggtggatgaatacacgcttccagaaggatgaagccatcatagccgacggcgccgcttttgacttggttcgcgcttccgtcaatctcgtattggctggtctgctcatcgccttgggaacttccttgaaactccccctttccaccacttatgtcacctttatggtagccatgggtacatcgcttgccgaccgtgcctggggacgtgattcggcggtattccgcattacgggtgtgctcagcgttatcggcggttggttcatcactgccggagcagcgttcaccatctgttttttcgtggcattaattatccatttcggcggtacggttgccatcctggcactgattggtctggcagtcttcatgctgattcgtagccaagtgatgtacaagaagcgcaaagagaaagaaaaaggcaacgagaccctaaaacagttgatgaagagcacggacaacagcgaagtcatcgaattactccgcaagcatacccgtgaagaactggtgaagattatggaattcacagaagagaattttgaacgtaccgtcacttccttcctacacgagaatctacgcggactgcgtcgtgccatgggctcagtaaaattcgaaaaacaactcatcaagcagatgaagcgtaccggaacacttgccatgtgccgcctcgacaacaataccgtactggaaaaaggactctattactatcaaggcaacgactttgccagcgaactggtgtacagcgtaggccgtctttgcgaaccttgcttggagcacatagacaataacttcaatccgctggatgccattcagaaaggagaatttacagacgtagccgaagacatctgctatctgttgcaagtatgccgccacaagctggaaacgaacaattatgatgaactggaaacagagattcgcaaagccaacgacctcaacggccagttgtctcacctgaaacgagaagagctgcaacgcatccaaagtcagagcggcagcatcaaagtcagcatggtatacctgactatgatacaagaagcccaaaacatagtgacctacaccatcaacctgatgaaagtaagccgcaagttccaggcagaaaaagaagagttatgagttataagttataactccttaagccccatcttctccgcccgttgcaacataaatgcacgggcggcttcgtattcattgggaatgatgccgtccaaaatggcatccttaatggcactcttcaaggcacctacctgctggcaaggagaaaggccgaaagtcttcatgatttcttcaccactgaccggaggctggaaattacggatacggtcgcgttcctccaaatccttcagcttctggcgtaccaactgaaaattattaaggaaacgtttcttacgctccatattcttggaagtaatgtcggcttcgcacagtgtcatcaggtcgtctatatcatcacctgcctcaaacaagaggcgacgcactgccgagtcggtcactacatcatccgctatcacaatgggacgcatgtgcaggctcaccattttctgcacatatttcatcttctcattcatagggagcttcatcttgcggaaaatatcgggtatcatcttctcgccaatgaaattatggttatggaacgtccagcccgcacggggttcccaacgcttggtggcaggcttggctatatcatgcagaagagctgcccagcgtagccaaaggttgtcggtcttcttgctgatgttgtcgagtacttcgagcgtatggtagaaattgtccttatgggcgcgtccattacgcgtctccacgccttgcagcctgacaagttccgggaatatcagttccagcagaccacagcggtccagctcaatgaatcccttagacggaataggtgacaagatgattttgttcagttcgtctgcaatgcgttctttggagatgatggagatgcgttcgcgattacgctccagagaatcgaatgtctcatcgtcaatatagaatcccagctgggtggcaaaacggacacagcgcatcatgcgcaaagggtcatcactgaaagttatatcagggtcgaggggagtccggatggtcttttccttcaagtctccaataccgccaaaggggtcgaccaactcgccataacgcacccggttcaggcaaacagccagtgcattgatggtaaaatcacggcggttctggtcatcctccaatgtaccgtcctctacaataggcttgcgggaatcgtgtgtatacgattcttttcttgcacccacaaactcaacttccgtaccatagtacttcaattgtgccgtaccgaaattcttgaagacggaaacatgcgccccacgccccagacgcttacccagcgcctcggccatggcaatgccactgcctaccaccaccacatcaatatccttggaaggacgttgcaggaaaatatcacgtacatatccaccgactacgtaacattccaatcccaattcatcagccgtttcggatatccgcttgaatatatcatcactaaaatattgcttcagttcttctgccgtcaaatctatcataaataatgcgctaatgtaatgaatacgcaaatgtgttaatggtctattagcacatttgcacattaaaatgctgcaaagataaagatattatttctatttttgtggactctaactccaagaacaacaaatatgaaaaaagtaatactccttgcatgcctatgctgtacactcttctcttgcgaagatgtggagaagaaggccggtgaaaaactacaagctgcccgcgaagcgtttgaactcggcaactacaatgaagcgaagattctgattgacagcatcaagatgctctatcccaaagcgtttgaaactcgccgtgcaggcatcggcctgatgcaggaagtggaactgaaagagcaggaaaagagcctggtctatctggacagtatgcttcaagccaagcaaaaggatttcgatgcaatcaaagggaaatacacttttgaaaaagatgccgaataccagaatatcggcaattaccttcatccttcccaagtgatagaaaaaaatctgcatcgctctttccttcgcttccaggtagacgaaaacggagtcatgagcatgacttccatttattgcggagcccataatatccaccatgtggccgtcaaagtcactgctcccgatggtagctttgccgaaacacccgccgccaaagacagctacgaaaccactgacctcggtgaaaagattgaaaaggcagacttcaaactgggagaagacggaaacgtcatggggttcctttatctgaacaaggacaagaatatcaaagtcaactatcaaggggaacgcccctattccatcaccatgactgccgccgaccgccaggcccttgtcagcgtctacgagctggcacaactgctgtcatccatgacggaaataaagaagaatatggaggaagccaatctcaaaatcgaatttgtaaaaaagaagatggaagagagaaaagacaatgcacaagaataaaaagaaggaaaccggatgatatattcattacttagtcatccggttccctttttattatcagtaaagccttaccaaactaatttaggtaaataacggctcagacatgtacgcaaagcagacagagtgatgggttttaccagcacttctgaggctccgcattccaaggctttttcacggtcggcagtaaaggcgtaagcggtctgcatgatgatgggaagttccttatccttcttgcgaataatcaccgtagcatccagcccgttcataataggcatttttatatccatcagaatagcttccgctttgtcgcgattctcttcgaacaaatttacaatatcctcaccattctttgcccatagtatctcgcatttcttgccgataatagcctttatcagtttaaagttactatcatcatcttccgcaaccagaataagcggacggtaatctcctgacactttttctatttccatgacctatgcgttttgtttatataggggcaaagatataaaaaataatagatttgcactatctttgcaactcattaaaaaaatatataatgatttctatagacggactggccgtagaattcggcggaactactttattcagtgacatatctttcgttatcaacgaaaaagaccgtatcgccctgatgggtaaaaatggagcggggaaaagtacattattgaaaatcctggcaggtgtaagacaacctacccgtggaaaaatctcagcccccaaagacagtgtcatagcttaccttccacagcaccttatgacggaagacggacgtaccgtattccaggaagcggcgcaagcctttgcccacctgcatgaaatggaagctgaaatagagcgcctcaacaaggaactggaaacgcgtaccgattacgaaagcgacagctacatggaacttatcgagaatgtctccgccttaagcgaaaagttctatgccatcgactccaccaattacgaggaggatgtggaaaaagcactgctcggactggggtttgtacgcgaagacttcaaccgccagaccagtgacttcagcggcggatggcgcatgcgcatcgagcttgccaagctgttgctgcaaaagcctgacgtgctgttgctagacgagcctaccaaccatctggacatagaatccatacaatggctggaagatttccttatcagcaatggaaaggctgtcatcgtcatcagccacgaccgtaaattcgtagacaacatcaccacccgtaccattgaagtgaccatgggacggatatacgattacaaagtaaactactccaaatacctggaactccgcaaggaacgccgcgaacagcaacagaaagcctacgacgaccagcagaagttcattgccgaaaccaaggaattcatcgaacggttcaaaggcacctactccaaaaccctgcaagtgcaaagccgcgtaaaaatgctggagaagctggaactgctggaagtggatgaagaagacacttcagcgttacgcctcaaattccctccttctccccgctcaggcaattatcccgtcatcatggagggagtagggaaaagttacggtgaccatgtggtcttcaagaatgccaacctcaccatagaacggggagacaaggttgctttcgttggtaagaacggtgaaggaaagtcaacgttagtgaagtgcatcatgaaggaaatagaacatgaaggcaccctcacgataggacacaacgtgcagattggatatttcgcacaaaaccaggcctcattgttggatgagaacctgaccgtattccagaccatcgacgatgtggcaaaaggggaaatccgcaacaagatacgcgacctgctgggtgccttcatgttcggtggccccgaagagtccatgaagaaggtcaaggtgctttccggtggagagcgcacacgcctcgccatgataaagcttttgctcgaaccggtgaatctgctgatactggacgaaccgaccaaccatctggacatgaaaaccaaagatatcctgaagcaagcgttactggattttgacggtacccttatcctcgtcagccacgaccgtgacttcctggacggactggtaagcaaggtatatgaattcggcaacaaacaagtgaaagagcacttgagcggcatctacgaattccttgaaaagaagaaaatggactccctccgcgaactggaacgataagcatctgctaaacccggcgtccgaacaaatggccgatacatattgttttcattttactaaacacttaactaagagatattaaaatgaaacaatatgatgccatcataataggattcggcaagggcggcaagttattggccgccgaactagtcgaacggaattggaaagtagccatcgtggaacgttcccctcagatgtacggaggaacatgtgtaaacgtaggatgtatccctaccaaaactctgattcacgaatcggaatatgcggaaaggagatactatgacgattataagaaccagtccaaactgtatgcacttgccgtggcgcggaaagacaagcttgtatccttcctgcgtgagaaaaattatgaaaatgtaaaaaacaagcctaatataaccctctatgacggaactgcttctttcttgtccgaaaatacaatccgtatagtctccggcaaggacgaaacgattcttgagggaaaagagatattcatcaacaccgggtccacccctatcctgcctgccatcgacggactcaaggagagcaagtacgtatataccagtgagaccttgctgcaatcgaacaaactgcccgcacacctgctcgtcatcggcggcggtgctgtcggattggagtttgccactatgtatgcaggctttggaagccatgtcacactgctggaagcgggaaaccgctttctgcctaaagtggaccgcgacattgccgcctccatgctggaagcattgaaccgaaagcgtatcaatgtccggttgaacgcccgtgtccaatccgtgtacgacacagccgaaggaataactctgacctatacggacagtgcaaacggcactccctactacctgaaaggagatgccttgctggtagccatcggccgcaagcctatgactgcagagctgaatctggaaaaagcgggtatacaaacagacaagcggggagccatcgttgtcgacaaccaattacggactacagccccacacgtatgggccctgggggacgtaaaaggagacgaacagttcgactacttgtccatcgatgatttccgtatcatccgtaatcaactctttgaaaacaaaaaaaggagtacaaaagaccggtatccaatcccctttgccattttcaccgacccaccgctggcacatataggactgacggaagaggaagcgatgaagaacggttattccatacatgtggcacgtatccctgctgccatgattccacgtgcccgtacgctacacagcatagacggtatgctcaaagccattgtagacatccataccggacggattctgggttgtaccctactttgtgccgatgcaccggaagtaatcaataccgtagcatcaatcatgaaaacgggacagcgttaccatttcctgcgggacttcattttcacccaccccagcatgaatgagggattgaatatgttattcaaacctttttagcattttctatttggtaattaagtccttaacctctatctttgcatccgtccaaagatagaggaatgaaaaagaaacagtacataacctatattctttttttcatcagcttgataatgctggtgatacccgtcattccccaccatcatcatgccgacggaatgatatgcatgaagaatgatatcaccgccgattgctgcggacaccgtcatagcccgggcaacgagcactgctgttgcgacacgggatgcatgacaacccactttgtacaacagacgcccagctcttccaatgatgtgtgttcacatccggatgccttgtggacagtcaccctactcattgaacctttttccaagttactcatcctacccgagtttgatataagcaggcaggagtgtatctatttagaatctcttcatagtacatttatcatatgtgctacgggacttcgtgcccctccgtctcttcttgcttaactgttaccggaacatcaccgggacagatttctatccggcataaggaacaatgcaatttggttgcacgccctatgccctaactttgtattcaaaatcaaaaagtaagaacaaatatcatcatgaaaaaagttattttcatgggagtcttgggattattccttttaggctcctgcaacagcaagtccggaaacagccacgaaggacataatcacgaaacagaagagcacaatcatgacggacatgaccacgaaggacatgaccacgaacatgagggacacaaccatgagcacgaaaagcaggaaaaccatgccggaggaagcgatgaaatcatcctgccaccggcaaaggcacaagctgccggcgtagcagtcagcactgttaaaccgggtagtttccatcaagtcatcaagaccagcggccaggtgatggcagcccaaggagacgagagcgtagccgtagctacagtagcaggcgtggtttccttcaagggaaaagttatcgaaggaatgagcgtcagcaaaggtactcctttggtggtattgtcatccaaaaacatggccgacggagacccggtgcagaaagcccggatagcctacgaagtttccaaaaaggaatatgagcgtatgaaagcactcgtaggcaacaaaatcgtatctgaaaaggaattcgcgcaagccgaacagatttatgaaaatgcccgtatcagttacgaggcagtcgcaaagaaccattcggcaagcggccaggcggttgtttctcccatcagcggttatgtgaagaatctgttggtgaaagaaggggactacgtcagcgtcggccagccgttggtaagcgtcacccagaaccgtaagcttttcctgcgtgcggatgtatccgaaaagtactatccttacctgaacagcatcggttccgccaacttctgtactccttataataataaggtatatacattgaaagaactgggcgggcgcatgctttcttatggaaaggcttcgggtgagaacggatattatatacccgtaacttttgaattcgacaataagggagacgttattcccggctcgtttgtagaagtattcctattatcctcaccaatggagaacgtgttgtctcttcctcacagtgcgctgaccgaggaacaaggcagcttctttgtctacctgcaactggatgaagagggctacaaaaaacagcttgtcaccctgggtgccgacaatggcgagagtgtacaaatcctttccggcataaaagcaggcgatcgcgtcgtaacccaaggagcctatcaagtgaagctggcatcggcaacgaatgctattccggcacatagccatgaacactaatctcatgtacaatttgacaatttacaaagtaccatttcgctatgcagtataagggttacgtgacgaatgggagtgtaaagtcagataaacaagaaatattagataaaacagcaagtgcggctgacattgcgcagcccaattgtacattgtacattgtaaatagtaaatagaaagatgttaaacaaaataattggtttttctcttcagaaccgcatcctggtgctggtagcatcggtgctgttgctgattggcggtacttataccgccatgcatacggaagtggatgtgttccctgacctcaatgcgccgaccgtggtcatcatgaccgaagcaaacggtatggcagcagaggaagtggaacaactggtcacttttcccgtagaaacggctgtaaacggtgcaacgggtgtgcgccgtgtacgctcttcctcaacgaacggtttttctgtagtctgggtagaattcgactgggatacagatatctatcttgcccggcagattgtcagtgagaaactggcagtcgtcaacgaatccttaccggccaacgtaggcaaaccgacactaggcccacaatcgtccattttgggcgagatgctgattgtaggtctgacagcagattcgacctctatgctggatttgcgtaccattgccgactggaccatacgtccccgcctgctctctacgggcggtgtggcacaagtagccgtactgggcggcgacatcaaggaatatcaagtgcaactggacccggaacggatgcgccattacggcgtgacattgagcgaagtgatgaacatcacccgcgaaatgaacctgaatgccaatggtggagtactctatgaatatggcaatgaatatatcgtacgcggcgtactttctaccgacaaggtagaccagatagccaaggccgtggtgcggagcaacggagtctccggcgcccctatcctgctggaagatattgcagacgttcaaatcggagccaaacttcctaaactgggtaccgcctcggaacgcggtaagcatgccgtactgctgacagtcaccaagcaacccgccacaagcacgctggagcttacagacaaactggaagcttccctgcaagacctgcagaagaatctaccggcggacgtaaaggtttccacagacatcttccgtcaaagccgtttcatcgaaagttccatcggaaacgttcagaagtcgttgttggagggaggtattttcgttgtcatcgtgcttttcctgttccttgccaacgtacgtaccacagtcatctcgctggtgacactgccgttgtcactgattgcctccatccttgccctgcactatatgggctttacgataaataccatgagcctgggaggtatggctatcgccatcggttcgctggtggatgatgccatcgtggacgtggagaatgtctacaagcgtttgcacgaaaaccgactgaaacctgccggcgagcgacttcctattctggaagtggtgttcaatgcttcgaaagaagtgcgtatgcctatcctcaattcaacgctgatcatcattgtcagcttcgtaccactgttcttccttagtggtatggaaggtaggatgttggtaccactaggcattgcattcatcgtggcattggcggcttcaaccgttgtggcactgaccgtaacgccggtactttgctcctatctattgggaaaagagaaaacgaaaaaacaaaataacgaaaacagcgattctgccgtagcacgcaagatgaagcaatggtatggttcagcactgacttttgtattggggcataagaaaggggtacttggaggtattatcggactatttgtagtggcactcggctgtttcttcaccctgggccgctcgttcctgccgcctttcaatgaaggttcgttcaccatcaatatctcctcgcttccgggtatctccctggaagaaagcgacaagatggggcaccgtgccgaggagctgctgctctccatccccgaaatacagaccgtggcccgtaaaacgggacgtgcagaactggacgaacacgctctgggagtaaacgtctctgagattgaggcaccgtttgagttgaaagaccgctcacgcagcgagctcgtggcagaagtccgcgaaaaactgggtaccattgtaggggcaaacgtggaaataggccagcctatcagccaccgtatagacgccatgctatccggtacaaaggcgaacatcgccatcaaactgttcggcgacgatctgaaccgcatgttcactctgggcaatgaaatcaagagtgccatccagggtattcccggtattgctgacctaaacgtggaacagcagattgagcgtccgcaacttgtcatttcgcccaaacgggaaatgcttgccaaatacggcatttcactgcccgaattttcggaatttgtcaatgtctgtctggccggtgaagccgtttcccaagtttacgaaaagggaaagagcttcgacctaaccgtacgcgtgaaagacgacctgcgcgacaaaatggaaaaaatacgcaacttgatgattgatacgggcgacggacagaaaattccactgaactatgtagcggaaatccgctcggccatgggtccgaacaccatcagccgcgagaatgtaaagcgtaaaatcgtcatctccgccaacgtggccgaccgcgacctgcgaagtgtagtcaatgatatacaagcccaggtagacgcacaaatcaaactgccggaaggataccacatcgaatacggcggacaattcgaaagcgagcaggcagcaagccgcactctggcacttacttcgttcatgtccatcgtggtgatattcctgctcctctaccatgaattccgcagtgtgaaggagagcgccatcatccttatcaatctgccgctggcattgataggcggtgtattcgccctgctcatcacaacgggagaagtgagtatccccgccatcatcggtttcatctcactgttcggtatcgccacccgaaacggaatgctgctcatcagccattacaaccacttgcagcaggaagaaggctatggcgtctacgacagcgttatccgcggttcgctcgaccgtctgaatccaatcctgatgaccgccctatccagtgcactggcacttatcccgctggctctcagtggcgacctgccgggcaacgagatacaaagcccgatggcaaaggttatcttaggcggccttttaacatccacgttcctgaacggtttcatcattccgattgtttatctgatgatgcaccgtaaccaacaacctaaaacgtcagacaatgaataaaagatttttcatattcagcgccgccatcctcgcttttgtggggatgagcgcacaaacgtccggcattgatgccgtgctccagcagatagaggccaacaacaaggagttgcaggctaactcccacctcatttcctcacaaaaactggagaacaagacaaacaacaacctccccgaccctacactgtcatacgcccacctttgggactccaagaacagtgacgaaacagtcggcgaaatggtcatctcacaaagcttcgacttccccacgctttacgccacccgagggaagatgaaccgactcaagacaaatgcactggatgcacaagccaccgccttccgccagcagatattgctgcaagcgaaggaagtatgcctggacatcatcatgctgcaacgccagcaagccctgctcgacgaacggttaaagaatgcggaggagctgtcggccatgtacacccgacgtttggaaacgggagatgccaatgcactggaaaccaacaagattaatctggagttgctgaatgtacgcacggaagcccgcatgaaccagacggcacttaacaacaaactgaaagagctgcttgtcctcaacggaaaccagccgctcacaccgggacgtcccatgcccgataccacacccgacgcccaaacactcggattgacagaatacccggcagtgccgttgccggccgacttccacccgctggccgacgaactgctggcttcagaccccaccctgcaatccttgcagggtgaaagttctgccgcccggaaacagatttcggcaagcaagcaaggctggctgcccaaactggaactgggttaccgtagaaataccgaatcggggcatccgctaaacggtgtagtagtaggcttctctttcccgcttttcgaaaaccgcaataaggtcaagatagccaagacacaagcgctcaacattgactaccaaaaggagaacgccgcactgcaagccagctctgccttgtggcaactctatgaagaggccaagaacctgcacgcttccatggaggaatacgagcgcaccttccatcaacagcaagacctttctttactgaaacaagcacttatgggaggacaaatcagtatgattgaatacttcgttgaaatatcggttgtctatcaaagcaagacaaacctcctgcaactggaaaaccagtatcagaaggcaatggcacagatatacaagagccggttataaatagaaagagctgtctgcggttgacagacagctctttctatttcaatatattgtagttatagttttgtgactttacccataaacagaataactcccgtactcttctcctttatcagaaagatgaaaggacggtccacatagaacggaattaccgtacttggtccgggagcggccacgtccattcctccgacagttacagccgcagcttccgtcccctcttcattcactttcacataagtgaactgttgcagcaaactgataaacaaatcctcatccgccattccggaaaaatcggccgatggagtaaaagcctcctgcattcccattgccatcatatcgtcaatgagttctttatcatattccatttcaaaccggggtaacttaaggttcaaggcagagcttgataaactactgttccattccccccagcgctcgtcattcagctgcggcaggcactcatccaacgattttccctctgccggcaagagcaccaccatactgaaagcctcattgccgtaaggcaactctgccattgagaaatactcattctcggcatagttgaatctctcgtcacgaagattcatcatgtgtacagtcgatttgcttccgtcagcattcgtaaaagcctcttctgccgtatccgattttttgaattgattcttccaaatccccttgaaataaagcgcattcaacagataaagacgcgccgtctccggaatctcattcaagactttggggatgcaattattcgttttcccggcacaccagccgtttataatgtccggagccttgggagaggcaaaatccagctcctgcacttgcgcgtcatacatctttttgtttacgcttacaaagtcgtcatgaacaccgaaccctttctttatccagatggaattggcaattcccaactgtgtggtattgtccaaatcgagcaacgcctccaccagcttcttattatagttgttcatttcttccaacgaatagcccgaaaagcccaggacatctgtcatctcagatagtgtgtttcccaacgctccattggcaatcatagacagacagagcgaagcgctcaaaggagagatgaacagattgggcttttccacctcagttttacaaacctgattaaagaaacggaaagcgaaatccgttcctaaatccatcatctcctgctcggcacgggtcaaggcaatgtctttgcgaggcttgggttgtggtgaagagttgtcgtcactctggcaggctgcaaggatacaaagtaggcttaaggcagtaatcgtttttttaagcataagcaaatagtattagttttaaaacagttatctatatatagaaaatgcttgaacaaacaaaatactgcattgaagaaacaataaaaaatagtacattcctactctattatcatactgcaaagttctgcatattttttgcagtcgcactgcatatgtgttgcagcaccactgcatatgtgttgcagtcgcgctgcatatatatttgcagtgtcactgcaacagctctgcagtgctactgcaaaatatatacagcagctttgcagtaacgtgattgatttcacccggttattgttgccaattccagcaccccttccggcaaatatccgctgcgtatgcgccattcctggggataaagattattggcacggttacctatattcttgacaaatcctagaggtatctgtttgtaggtgagcaagacaatgccgcgcggagcagtctccgaaaggacaacagcctccttgcgcagatagctgatggcctgctcgcggcctatctcttcatgggcaaaggcatccggattcagtgctatactcatggcgagcccatgagcaggcatccagtcttttcctttcaactcggcaacatctaccccagcctgcacgatacggagtgacgaacgcaaagccgacagttcggagagatacgctttagggaaagcgctgacgttgttgccattgacgataaattcgtaattatccggaaccgcaaaccactcatgcagtgccgaaagctgttctttggaaacacccggagttttcgctccttttccttgaggttttcttcctttttcccaggatttcacctgcccggcccaggtattcccatcgctcacgcccggtttgcggagaactgccaaaaagaatccttcccccttcgtccgatggggcaggaaacgataggcgggaaagtcctctcccgacaatagattacccgtaatattccagtcagtagaaatttccaacggcaatacctccgccccgaattcatcccgtatccaacggatgttctcttcgttttcctttgtattataggtacaagtactgtagatgagaatgcctccggacttcaagcaaggccagatatccgtaacgatgcgacgctggcgctgccagcagatttccacattctccccactccactcacttaccgcaacggggtctttacggaacatcccctcgccagagcaggggacatccgtcaatatgacgtcgaagaagtccgtcaaggaagaaaaatctgccgggtcattattagtgaccaccacaccggaatgcccccacttcgtaagattctccgccaatacctgcgagcggttgcggattacctcattggccaccagcagactgcctgcgggcaacacgctacgggcatgcgtggatttcccgccgggagccgcacagaggtcaagcatcaccaccggtccttcgcccacataccgcctcaaagcctgctccacaaacatagacgaagcctcctgcacatagtagcagcctgcatgaaacagcgggtcaaaagtgaatgtcagccgcttgtccagatagtatccggcagtagaccaagggacatgcctaaaagaggaacgaaaaagactgaatgaagattccggtaatttatcttcattcagtcggatactgaccggctgctccccttccagggcggcagccagcttttcatattcttccacacccaagagggcgcgtgtataatcggtgaaagatgagggtagcttcatgctttgaactgttttatggcagcaaagatagtgcaaaatacgtttcaccaatctacggggctaaacaaaaagcacggttcaatactctttttaaaaactgagtttcacccctgcaaaataggaacgcggtgcacccggtccgtagatataaccggaatcgcggctcgctcctttatcaaaatctttctgataagaattgaatatattctgtacaccggcattgagctgcaaacagaacccttgaaaatcaaagtcgtaagctatctttgttccaagctcaaagaagtccggactctttaccaatacatccgcctcaccgttcacctccgaaagcaaatggggaacgtacatccgcccggtataattgccgttcaaagctattgagaaggctttaaccggcatataggtagctgtaaagtagccgtagacgtcgggagtacgcagtatcttgtcgctgtaacgttctttctccgacaagtgctcctcatccgcactccattcttcgggagagtcatagatacttcgttgaagcgtcagccctgcctgcaactgaaccttatccttataggcaacctttccttccaatgtgccgccatacactttagctcccgaaccattgatacgggtctgtatcagataagcgctaccatccgggtctttcaccggaggcgtcaggacaaacgggtcggaaagtttcgtgtagaagccttccaccagtaggtttgcctggaaatctccgaaatagtggtaccaatctaccgaagcattgaagctgcgcgaacgctcttccttcaatcctttggcgcggacaatggaaaccaactctccacccacattactgatatgcagatcttcatcaaacgcttgtggagcacggaatccctcagcataactgaaacggatattcacatcctgagtaggattgtaacggatattggcacggggactgaaaacagccttgtccatgatgctgtttttatctacgcgcccgccaatcaggaaactccactgttcgttcttccactcattctgggcatagacgcttgctatattcaccacttggttcaacggggcgggggtatatttctcaatcagttgttgcaagcggtcacccgttgccgtaggatcttcggccaaagcagcatcacgatacttctgtacgtccgttgccttgtcatgcagattgtcgtgattgaactcaatgcctccggtcaaatcggcaggcataaacagacacttgtcaaaatgataaatatactgggcacccagcacaccggtaaagtccgtagtcattccataagcgctgtaataactattgcgcacaatgtgctgagccgaagcataggtactgaacgtatgtttctggtttttggagaaagccgtgaacttgagcccacccgtgttgatggaatgtttcagctgttccaccagtccgggcgccccggtaccgttcaatccggcatcctcggctatatgagggggaaggctgaagccacttccaccacggcggaattcctccatatgatggtattcaaggctcagcttggaataggcacttgtccggtagtaagcattcagaccgacagtctggttcttcagcttcggtaattcggaaaaaccgtctccgttggagtcccatgccgaacgatgcctgctctggccgtacacataagcccccatcttactgtccgaagaaaccaaggaaagattcagggtcgtgttgttgtcgaacgagccggaaccgtcgaaattggaaatggtatgcgagaaagaaccggaattgcgaatcggttccttcgtaatgatattcaccgtcccggcaatggccgaagaaccgaacaaggctgaaccacctccacgcaccacttccacacgctctatcatgttggcgggaatctgttccaacccatacacaccggccagagaggaaaagatgggacgtgagtctatcaatatttgggtatatttcccatccagcccgttgatgcgcacttgtgaataaccgcaattctggcaatcggtctccacccgcacacctggctgaaaggccagtccttgcgacaaagtatgcgagtttgtctgctcaaacagtttaggagtgaccactttgaccaaagtgggtgccaagcgccgggcagtctcattgcggttggctgtgactaccaccccgtccagtgccaccatgtcttcttccaactcaaagttctcttccaaggtcttaccacgtttcagaacgactttgcgctcctgcgacttataacctacggcactgacggacaacgtgaactcaccttcaggcagattctttaggaaatagtgaccggtggcatcggtcatggtcccgatggtggtgcctttcagcgaaactgtcatataaggcaaatgttcccttgtacttttttctattacatgaccgacaatattggcatcggtactcttcaaatcttcggcataaacggttgatgagagtaacagacatactgctcccaccacaaaaaatatatattttttcatgtacttctaaaataatatgttaatcaatgaggttgacgcaatcccacaacggaattgccttaatctatcggatttgaaaaaaagaagggggagcacgcaggcaaataccgccacgaagctttacacacttgatgcattccgtggtaagaatgctcagtacacacaacaaaacaaggaaaaccgtcgcggcaaccggaagcaacggaagggaagaagagacgaaagaggctagatagaaaatggtttctaactgcacctctgtatgctcatgctgtcccttgaatggatgggaatgcacaatgataacaccattcaccacatgcgagtgggtaaacagcgtaattcctcccagataggcaatgaacagcagagggaggaaacacttcattatattcctcaacttcatcaagacttcccaataaaaacagatgtgcgaagataacagtatttacaataagaaacaacccggtttgtatatttacctctatttacagtcgcaaatacctacttcttgttattccaggaaaaagacaataagacattttccggaaaaatatcgtcttatttccggttttctaaaaaaaatatcttctctttgcaactttataaaggtgacgatacgtctaaccaacaaagaaacaaattaaaaaaccatagattatgaaacgtatcattttaggattaatgctcgccatgatgttctgcacactggtgcaaggcgcaaacagaaccgtaacagagaacgacggtcaggggaacaagaaaagagtcatcgaattgagggacactgtcatcaatggagaaaccgtaacagacacactcagcatcatgacttatgaaaacggtaccggcagtagcgatgctccggaaaaatggagaacccaccacaacagcagtatggactggaacgggttcgacctcggaagcaagacttcggagaccgtgattgccgtaacagccatcgtctttgtattcggactgccgctactcatcatattcgtagtattcttcttccgctataaaaaccggaaggccaagtaccgcctggcagaacaagccctggccagcggacagcaactgcctgaaaacttcttcaaagaagccgcagcaacagacatccgtagcaaaggcatcaacaacatattcgtcggcatcggcctgttcatcttcctttgggccattaccggagaattcggtctcggatgtatcggcttactcgtcatgttcaccggcttcggacaattggtgattttctacggccaacagaagaagaacgaagaaaaatgagtcaactcaatgacatatcgttagtcgcacaggtcgtggtgtttcaaaacaccaaggccttcgaccggttggtgaagaagtaccagtcgtccgtacggcagttcttcctgcaccagacctgcggcgacagcgagttgagtgacgacttggcacaagatacgtttatcaaagcctatacaaacatcgcttcgttcaagaatctatccaatttctcgacctggctctaccgtattgcctataatgttttttatgattatattcgcagcaggaaagagacggacgatttggatacgtaccgagtggatgctcaatgcagcacactgcagcaggacgtggggcagcacatagacatttaccgtgccctcgccacactgaaggaaatggaacgcacctgcatcacgctcttctacatggaagaccaaagcatcgaaaagattgcaggtatcaccggatgtccggcgggaacggtaaaaagccacctctcgcgggcgaaagacaaaatggcttcctacttaaaacaaaatggttatgatggaaaataatgataaactcctgacttcattctttgccgaacaccggcaggaaatagccgataacggattcagccgccgcgtactgcggcacttgcccgaccgtagccaccacttggcacagatatgggcagcattctgctttacattgtgtctcgtgctattcgtcgccctcgacggagtgcagctgatactggacaccttgcgcgagacctttgacacagccatccggagcggagcatcagagcttgatcccaagtcgttaatcattgccggagtagtattgctctatttcggttaccgcaagattgtatccatggcataaatatatatccgtgcccggagaaagaggacatgtactactccaacaaagtcattggctcttatcttatccaataaggtaagggctaattttttttaaacggacagacatatatcaacaagaaattgtatctttgcccactcagaaaactaaataagaggagaaagttttgagaaagattctattcatcacattattcgttttttctattgggaatatcgaagcgcaaacaacaagcgattccatcgtcatgaattacttgaaggaaatgggcgctcccgttacttacaacaatgaagtgaaattactgatgaccggtcatgacaagttcgtcgacctcttcgagaatatccgccatgcccggcatcatatccatctggaatatttcaatttccgcaacgactccatagccaatgccttgttcagccttctggcagagaaggtcaaggaaggggttgaagtccgcgccatgttcgatgccttcggtaactggtccaacaaccaaccattgaaggaacaccatctgaaatccatccatgcccaaggcatcgaaatcgtcaagttcgaccctatcacttttccctgggtaaaccacgccatacaccgcgaccatcggaaaatagtagtaattgacggaaagataggttatactggtggcatgaacatcgccgactactacatcaacggattgcctaaaatcggtaaatggcacgatatgcacatacatcttgaaggagatgccgtgcgctatctgcaaggcatcttcctgaccatgtggaaccgagagacgggacaacacgttggaggtcccgcctattttccggacattccgcaactgcccgacagtattgccgaagaaatagccatcgtagaccgcacgccacgcgaaacaccacgctccatcagccatgcctatgcagcttccatacaagccgcacagaagaatatccgaatcgtgaatccctatttcgttccgaccaaatcaatccgcaaggcaatcaagaacgcactgaaaaaaggtactgaagtggaaatcatgatacctgccgtgtcagacatagcctttacaccggatgcctcattctatatagcacataagctgatgaagaaaggagccaagatatacctcttcaacggcggcttccaccattccaagataatgatggtagacagcactttttgcacagtaggtaccgccaatctcaacagccgcagcctgcgctacgactacgagacaaacgctttcatcttcgaccccaagaccaccaatgaactgaatgccatgttcgaacgagacatgcaaaacagtacgctgctcactcctgaagtctggaaaaagcgttccggatggaagaaattcgtaggctgggtgggaaacttgatgacccccttcctctaagtttttaatttttaattattaatctttaattaattcccctacctttgcgttcggataaaaacagagcattacatcatgaagcaatatttagacctgctgaaccgcgtactgaccgaaggcgtagagaaaagcgaccgtacgggtaccggcaccatcagcgtattcggccaccaaatgcgtttcaacatggatgaaggcttcccctgccttactaccaagaagctgcatcttaaatcaatcatatacgaactgctatggttcctccggggagacaccaatgtgaaatatctccagaacaacggtgtacgtatctggaacgaatgggcgaacgaaaacggcgacctaggacatatctacgggtatcaatggcgctcctggccgaactataaaggcggatccatcgaccagatcagcgaagctgtagaaaccatcaagcacaatcccgactcacgccggattatagtcagcgcatggaatgtaggcgatttggacaacatgaacctccctccctgccacgctttcttccagttctatgtcgccaacggacgactgagtctgcaactgtaccaacgtagtgcagacatttttttaggagtgcctttcaacatcgcttcctatgccctgctcctgcagatgatggcacaagtcaccggactgaaagccggggatttcatccataccttaggagacgcccatatctatctgaaccatttggagcaggtaaagctccaactatctcgtgaaccgcgggatttgccgcagatgagaatcaatcctgatgtgaaaagcatcttcgacttcaagttcgaggatttcgagctgatcaactataacccgcatccgcatattgcagggaaagtgtcagtataaatcctataataaaaagatagaaagagaaaagaattttacacacatatgattagtattatcgccgcagtagatagaaagagaggtatcggttatcagaaccgattgctattttggcttcccaatgatttaaagcgtttcaaagccctcaccacgggaaataccatcatcatgggccgaaagacctttgaatctctccccaaaggcgcgcttcccaaccgccgcaacgttgttctgtccactcaaaaagatttgctctgtcccggtgcagaagtttttccctcactggaagaagcactgaacagttgccaacccaacgaacacgtctacatcatcggcggtgcaagtgtttatcgccaggcattcccctttgcggatgccctctgcctgaccgaagtggatgcagaagccactcaggtggacgcctactttcccgaagtcgctccgactgtatggcaagaaaaaagcagggagtctcaccccgcagatgagaagcatccctgcccttatgcatttgtcgattatatccgccggcagaattaatcttcctcttcttctaccgttataggcatctgccgcttgatggcttcgtgaaaagaaatcaaggtttccgtacgcgccagtcccagcggctgcaacttatcatgtatgatgctcagcaaatgatggttgttgcgggcataaagctttatgaacatatcatacttgcccgttgtaaaatggcattccacaatctcgggaatagcttccaatgctctcgttacagcatcgaaggaagcaggatcctttaggtagataccgatataggcgcatgtttcatatcctatcttctccggatcaatcacatattcagaacctttcaatatacctaagtttgtcagcttttgaatgcgctgatgaatggctgctcccgatacattacaagctctagccacttcaaggaaaggaatgcgtgcattatcggctataagttttaaaatctgttcgtctaaagtatccaactgatgatgtcccatttcaaattctaatgattaataaattactatatctcccgcatatctatacggcaatatgcaaagttagctattttttcgccaataaaaatacggtttataacttttcttacaaaaaaagaataataccgcatatcaggcatttcaaagcgtatacgcaaattccatctcgcacgactggaaaattgcagatgagctttaaagatattatctttgtcgtagcaataataatgaaccgttatgaaaaagtattccttattcctattatgcctgatggcagcaatatccttgcatgcccaaagctttgccgattattttgccgataagaccctacgtatcgactatatctttaccggaaatgcagccaaacaagagatatgcctggacggactgtcttgtctcccctcttgggcaggaaggaagcatcacttgtctgaactgcccctgcaaggaaacggacaaatcattatgcgggatgctgccaatggcaacgtaatctacaaaacatccttttcttcgctctttcaggagtggctggaaacagatgaagccaaagcagtaaccaaaggattcgaaaacaccttcctccttccctatccccttcgtcctgcagaaatagaaataacactccttgacccgcgtagaaatgtacgggcaagcatgaaacatacggtcagtcccgacgatatcctaatacagcagaaaggtactgcccacatcacaccacataaatatctgctgcaaagcggcaatacagacaaatgcatcgacgtagccatccttgcagaaggatatactcccgaagagatgccggtattctacaaagatgcagccattgcctgcgaaagtctgtttgcccacgaacccttccggtccatgaaaaagtacttcaacattgtagcagtggccagcccctccgaagacagcggagtaagtgtaccacgcctcggagaatggaaacggacagcattcagttctcatttcagcacattctattcagaccggtatctgacaacctcccgtgtcaaatccatacacgatgcgctggctggaataccgtatgaacacatcatcatccttgccaatacggaagaatatggcggcggtggaatctataattcctatacccttactaccgcccaccatccaatgttccgccccgttgtggtacatgagttcgggcatagctttggcggactggccgatgaatatttctatgacaatgacgtgatgacagatacctatccattagatgtggaaccctgggaacagaatatcagcacgagaatcaatttcacctccaagtgggaagacatgcttgcacaaggaactcccgttcctactccctcttctgaaagtggaacatatcccgtaggtgtatatgaaggagccggctattctgccaaaggcatctaccgtccggcagacaattgccgcatgcgtaccaatgaatatcccactttctgtcctatctgccaacgagctatccgccgcatcattgaattttatacagaataagaacaaactaaacttaaagaacttatgatcagacttcaacgtattacaacagctgacacagacttgtacagctatatggagaaattaatgactcaatcgttcccttcagaggagtaccgggaactggaggaattgcgcaagtatacagataccaaaacgcacttctataacaatatcatcttccataacaacaccccggtaggcctcatcacttactgggatttcggacatttctactatatagagcattttgccattgaccccgcacagcgtaacggcgggtatggaaagagtgtactgaaccatttgtgccaactcttaaaacatcccatcgtcttggaagtggaaataccccaagaagaaatggctaaacgccgcattaacttctatcaacggcaaggattctccttatgggaaaagccctaccaacaaccaccctacaaagcaggagacaactacctacctatgctcatcatggcctatggagatatagaatgtggaaaggattttgactctgtaaaggaacacatctactgcgaagtatataatgtgaaatcttaaaaatccaatatacttaaaacaataaaggtcgtttcatttgttgaaacgacctttattatatcttaaatcaactcttactgacgcggttgcgcagaatagttaatcttcaaagcataagcttgacgaagagcttccttgatatctgttacgatacccattttcgtatcttggtcaactttcaaagacactgtcatctgtggctgatcttcttctttcatactggcacgttcaccaataatataatcttgaatttcagcaacttcagcataactgtcgttcaactggatacggctctcattacctaacttcttacgaaattcggcagtaggttttcctacgtagataaacgtaaccaacgacttcttctccagtttctccaattccgtagcttgcggaaccttaaactcaacctttaatgttacctcacgcatcgttgtcacaatcatgaaaaagaacaacaaggtgaagataaggtcaggcagagaagaagtgttcaacgccggcatctcacgtttaccagtcttattaaattttcccattacttcttttctccgtactttttaggttctgcctcagaaattctctgaggataaatttcacgaattgcatcttgctgttcttgatccaactcagcataatttttctgccacttctcttgagccaattcatcacgcaactcattataagctgctaccaactcattctgtacagccatatatgccttataggaagaaccgcggtcacaacgcaaagaaaccacatgattttccgttacttgaaccgtaccgaagaaagcaacattctttgaaatcttttccggcttcgtttcatcattgtacggattggcaatgaattcttttgttttcgcacgcaattggtcaactgtaatataatcattcccacacattaactggtcctgcatatttaagaagacttgcagaacattacgttctttcttcttctggtcctcaatcttctggtctttttccggtggaggcggcaaacgtcttgccaaaccacggtcagtatccatagatgtcgtgatcaagaagaaaatcagcaacaagaatgcaatatccgctgtagaacttgagttaatatcaggaacttttctttttccttttgccattgtaattactctttagattgatttacctcaatcggttatgataatttcttcttaatgctactaaaaatgattgccaagattgtaccagcaaacaagatatagatagaatagaggaacatatcagtaagcttcaaccagaaaggaacattttcagttccgctataacccggaataacgagtggctcttcactacccatagcccaagaaataacaacaactgcaaccaatataaccaaaccgatcaaagatttcaacgctgctcccggattatctttcagtgcagatccaaattggaacacaacaccaaccacggtagcaataatagctataaagaacaagacatacatcaaataaatcaatgcgtctgtctgagccggttgccacatttctgcgtcaacactcatcaatactgcatcgccctgagcatctccaccgaagtagaacaagcctaacactaccaagatgatagcgaacatgacatacagtacgtagtatgatactttatatgataacttagccatcttaattattttttgtatttcaagtcatatttgataaccatatccaacagtgagatagaagaatcttccatttcacttgtcaaagcttcaatcttagacaagatatagttgtagaatacctgcagaatcaaagcaacgatcaaaccgaagatagtagtgatcaaggcaaccttcataccacctgctacaaccgtcggagagatatcacctacctgctgaatcttatcaaatgcctgcaccataccgattacagtacccaagaatcccaaagacggagccatagcgatgaacagtgtaatccaagagcaacctttttccaagtaaccagcttgtacaccaccataagatactacagacttttctactacgtcaataccttggtcaattctcatcagaccttgatagtagatagaagcaataggacctcttgtgttacgtgcgatgtctttagcagcttcaacgtcacctttttccaaagcagcttcgatagcagacaagaacttctttgtattgatttcagccaaactcaaataaatgatacgttcaatacagaatgcaagaccgataaccaatgcgatagctaccaaactcatgaaagatgcagtaccttcaatgaactttgttttaatctctttgtggataccaccttctgcagcttccatagcggcaggagcagcagcgtcagcagcaggtgctacagctgcttgttcagtttgttcagctgcaggagcatcttgagcctgagcaagttgagttgagccaaatgttaagactcccatcacagcaacaattgcaaataactttttcattgtgtgtctaatttttaagattaattaattaatttatttattataatttgttgttttatctccattttatcacattgcggagagacggggattcgaaccccggataccctttaggggtatacacgctttccaggcgtgcctcttcaaccactcgagcatctctccaatagacgccttttctgaaatcgggtgcaaattacaaaaaaaatgcgaaccacaagcgttttcagctacaaatgtattcttttttttgttgttctgcctcattctccccgttttatattaaataaaatctcaaaattaataaactttaaaatcttaaagagcttatttgagcattccgaacacttttaaagcgttatcagaagtaacctgagccaccttttcaggagaattcccatagattccggccacctttaccaaagtatccttaacatatgcggtttcgttcctcttgcctcgattgggaaccggagtcagataaggggaatcggtttccagcacgatacgttccaaaggaatattcttcaagacttcgggcaaagttgatttcttgaaagtcaccaaaccatttattcctatcataaaatccgcaaattccataatcctgcaggcctcttccgaggtccccgtaaaactatggaaaattcctttcaaaggagtctgccgataaagtttcaacacattatatatatggtcgaacgcttccctacaatgcagcactaccggcaaatcgtattccaaagcccactcaatctgcctgcccaacgccctttgctgttctctgagaaaagtcttatcccaatacaaatccataccaatttcaccaactgcaacaaattcgttcgatgaggccagctcccgggccactatatccaactccttttcataatccgcatccacagacgtgggatgcaacccaatcattggatagcaataccccttatattcacgacacacccgaagcataggctttatggtggtactatcgatattgggcataaaaatatgcgtgactcctgcctcacgggcacgggccatcacttggggcaaatcccctgcaaactcttctaaaaaaagatgggaatgtgaatcaatcaatctcattcttcaacttactctttgcgtttttcaccagtacgataataatagattattccataatcacggcataaatccaaccgtttctcattaggagtaacctcctcaaattttttttccacctggttccatatatgcagaatcaactcatccgcttctgcacgcatcgaagccaaggtgtccaaactgcgggctgttaaaaattgaagattcttttgtttctcataactatccatgaaaatatcataatgcaccctcacttttgcaatcgtagggttataaatgggaattcctccctgagatatacgcttgttttccccatccacgattttacgcccccactctgccaaagcaggctctgtcgataaatcaggcacattattgttgcttgtgtccaaaccgtaatattccttatgagcaatacgcacttcagaacggatgacagctaaattcaacacctggataaaatgagaaatatacagacgggcagtctttacattagcctgatgcttacgtcccgcccgagcctgccgctcaaaacagtcggcataataagcttgcgcagcttcaaactttgtaagaaaattccgcgcatcagtcaataccttcaaagatacggccaaatcatacacattacatatatcacccttgacgaccactgctttcagcgcccgtattctcgcttgatctgtattaggcaatcttctataaggcatttctcccggatttaagttacacttcccgatgcatcaagttagccatcaagctcttcaattcttccttcttttcatccgccacgttcaccgccaataaactttccattgcgcgctcacaatactcttccatttttttctcacacaactccttgacaccaatctggttatacagttccgtcaccgcagcaaccttctcctccggattgaatgaaacagcatccacccaagcattcaaataagtcaactggccttcatccgcatgttcaaaagcctttatcagcatgtaggtctttttattgcacagaatgtcacctccaatattctttccaaagacggcagcatcgccataaacatccaggaagtcatctttcaactgaaaagcgacacccaagttcatgccaaaatcatacaacagctccgcatcttcagaagaagcccctcccaaaagagcaccaatcttcagacttgcagccaacaataccgaagttttcagacgaatcatttccagatactcctctgccttcacatctttccgatgttcaaactccatatccagctgttgcccttcacagatttcaagtgcggtcaagctaaatatatccatcacttctttcaaatgttcaaccgggcattgagccataaactgataagccaatacaagcattgcatcccccgaaagaatggcagcattgtcatcccagactttatgtactgtatccttgccacggcgacggtctgcacggtccatcaagtcgtcgtgcaaaagagtataattatgatacacttcaatacccattgcaggattaaaaatacgggtaatatcctcctgatacagattgtaggccatcaacatcaataccggacggattctttttccacccatggacagcacataggtaatgggagcatataaaccttgaggagtacgggtaaactgcaattctgcaatatgagaatttattctttctaaaagctcggaagctgtaaacatgacattttcagaatttaggaaatagcggataatgaaaagaggctgcattccggcagcctctcccacttatagatattttattactgcaatctaaacattacaggtacagtatacttaacgcgaacgggtttaccacgctgcataccaggcttccacttcggcatacccataatcacgcggacagcttctttgtccaaatacggatcaacacctctcaaaactttagcatctacaatactaccatccttattaaccacgaactgtacagttacacgaccttgagttccgttttcctgtgcaatagtaggatatttgatgttcttgctcagatactgcatcagaccagccataccaccattcggaaattcaggcatctgttctaccacttcgaaaatagtctgttcttccggttcttcttcttccactgctacgggaacatatttaatttccacagcctggttcaattcttcagaagatacgatagcagtttcttccacgtcagcatcgtcctcaacaatagtcaaggtttctgcaattgcaggagcttcggggggcggaggagtaacctgctccggttgttccgtaataggaataatttcctcttcaaatactaagtcggcaacagcctggctcgtatcaatcttgatgtcacgctttgtccactcgaacgcaacaaacatgaaagcgagcacaatcacataaccgacaagcagccaagtcgacttcttactctccaagtctgccttaggtgatttcttaatttccataatttataatataattttagtgtttctcatttggggcaaatatagcacttttcccaagaatgttcacgcactgctgtttttttttacacaataggcgctccattttcatttttttaatccttcaaaagcctccatgtgcttttgtgccacaaatgtaacgagatattttaaaaataccgtatctttggcaagaattttaaatgaaatattgaaattttctgttttgcaggtgttatacctatataactatagtataaaagtcatgagaaagataacaatagcaatcgacggcttttcctcttgcggaaaaagcactatggccaaagacctcgcccgcgaaatcggctacatatatatagatagcggtgccatgtatcgggcagtaacattatatagtatggagaatagtattttccagggtgaccgcatagataccgaaaaacttaaaagtctaataaaggatatacatatttttttccgcctgaaccccgaaaccggacgcccggacacctacctgaacggaataaatgtagaaaacaaaatccgtaccatggaagtgtcttcacgtgtcagtcccattgcagcattggatttcgtacgcgaagctatggtggcacagcaacaagagatgggcaaggccaaaggcatcgttatggacgggcgcgacatcggcactaccgttttcccggatgccgagctgaaaatttttgtaactgccagccccgaaatacgggcacaacgccgctatgatgaactgaaggccaaaggggaagaagccagctttgacgaaattctggaaaatgtgaaacaacgggactatattgaccaaaaccgggaagtaagtccgctgcgcaaagcttctgacgctttattgttggacaacagccacctgaccatttcccaacaaaaggaatggctggccgaacaattcgaacgggttataaaggagaagaactgaaccggatatggcaaaagtagaaatagacgaaggctccggcttctgtttcggagttgtcaccgcaataaacaaggcagaagaggaactggcgaaaggaggaaccctttattgtctgggagatatcgtgcacaacagccgtgaagtggaacgcctgaaagcaatgggactgattaccatcaaccatgaggaattcaaccacctccacaacgccaaggtgttgcttcgcgctcatggagaaccccccgaaacttatgacattgcccgccgcaacaatatagaaatcattgacgcaacctgcccggtcgtactccgcctgcaaaagaagataaagcaagagtatgtccaggaagacggccaagacaaacaaattgtcatctatggcaaaaatggacacgccgaagtactgggactggtaggtcaaactacgggaaaggccatcgttattgaaaagcaggaagaggcaaggaaactggatttcagcaaagacatccggctctattcccagaccacaaaatctctggacggatttcaaaacattgtaaaatacatagagggacacatctcaccggaagttacttttgaatcatacgacactatctgtcgacaagtagcaaaccggatacccaatatccgaaaatttgccgcttcccatgatttaatattctttgttagcggtaaaaaaagttccaacggcaagatgctgttcagtgagtgtaaaaaagtcaatgccaattcacatttgatagacagtgccgaagaaatagatagttctctgttagccggtgccaattccatcggtgtctgcggagccacttccacccctaaatggctgatggaagaaatttcagaagccataaagtcaaaacttaaataacagtttgtcatccttttggaacagcaaattaacgtaatttattagtcacggcctcagctttttccttatctttgcggcatgaaaaaatagtccaaatctatttttcatcatgattattaatactaaacaaaaagattgttatgggaacagttaagtgcattggtatcttgacatcaggaggtgatgctccgggaatgaacgcagccatacgtgccgtgacacgttcggctatttacaacggactttcagttaaaggtatatatagaggttacaaaggtctggtaaccggcgaaatcaaagaattcaaaagccaaaatgtcagcaacatcatccagctgggtggtacaatcctgaagacagcccgctgcaaagagttcacgactcccgagggccgccagattgcttacgacaacatgaagaaagaaggcattgacgccttagtgattatcggaggcgacggttcgctgaccggtgctcgtatctttgcacaagagtttgacgtgccttgtatcgggctgccgggaactatcgacaatgacctttatggaacagataccactatcggctacgacaccgcgctgaacacgatcctggatgctgtggacaaaatccgtgatacagccacttcccatgagcgcttgtttttcgtagaagtcatgggacgcgatgccggtttcctcgctctgaacggcgccatcgcctccggagcagaagcagccattatcccggaattcagtacggaagtagaccaactggaagaattcatcaagaacggtttccggaaatccaagaacagcagtatcgtactggtagccgagagtgaactgaccggcggtgccatgcactatgcagagcgtgtaaagaacgaatacccccaatatgacgtacgcgtaaccatcctcggtcacttgcaacgcggtggtagtcctacggcacacgaccgtatccttgccagccgtctgggcgcagccgccatcgacgccatcatggaaggacagcgcaatgtcatgataggcattgaccacgatgaagtggtatacgttcctttcacgaaagccatcaaaaatgataaacccatcaaaaaagaccttgtaaatgtattgagagaactgtcgatctgatgacagacagttcaggtaccccataaacagagaaggcgacatatgcgccttctctgttttttacaaccatttcttcactatattttccgtcctctcccacagttcttccatctgtacatgccgggtatacttctccgaaagagacttgggacggcaactggcattcaatgtacccgtacgtttaccggcatcctcatccagcaataagccgacagccgttgcagctcccttacggggagtacggataaaaggtctgaaaagcatatctgtcagcgggtcgaaccacagtaagtattcggccaactacaggtattaaacctttatatacaacaatagcgactgtcactatgaacctaatagtatcagccgctattgttttgttgaacccatatgttacaatttatatcagttacaagattcctccttttgccttgtcagtacacattccggatgtttcaacttccatttatgtggaagtagattcaaaagttcttcttgggttgcctttttgtgataaggcatttgtgcgataacatcgttcaggtataccctgggatttaccccgtgcgccttacatgtggccagcagagaacatatgacagacatattaaccgcagcttcgtgattaccacagaaaagaaaattttttctgctcagagtgatgggccgttggacattttccgccagattgttgtcccagtacaggcggccatcgtccagacatctcataatattatcccatttggtataggcatatgttatggccttgcctgtcaaagaacttggactgtatttaattccttctgtctccatccataccttcattgcctccatgattggcctggacagttcctgacgcgtctgtctgcgctcatcatatgacaggccggcttcgtcacactggcgttctattttatagacatgctgtatctgagtcagtgcatgttgcgccatctccctgttttcatccaaagcctgctcaaaatgacggcgtatatgcaccaggcagttgagtagccgcacgtcggggttggtcttgaaggctgtttcataacctgcaaaaccgtcacattgaagatatcccttgaagttatattgatttgccagggattcgatgaccgctccggcccgtgatcccccgtcgtaatggaagatgaccagtttctccatgactgatcttaccatccagagatattccttgtcggctctgtgtttttctctgttaatgaccggaactgtagtttcatccgcctgtacatagtcacaggagaagacttcccatttgagttcttcatacagaggcttaagcagttccacggttttcttgaaccagccgtccagtgtactttcggtaaggcctttcattccaagatggcggtattgctgtatctgacggtagaacgggacatgatattcatacttctgaagcagtatctcggtaagcaggctggtgtcagcaatgcacttgtcgaccggcatcagcggcatgggagctatctctacgcctttctgtccggctggaggaagcagggtactatccttgagagcatatttgggacggatgatcaccttgacgtaaagcattcccggcttgtgtttgacgacttttgttatctcttcgcctattctacggtataaagacaagtctacgcctttcggttctattgtatcggtttccaatacgggcaagtcctctatcattttgcggttctgacgatttcgttttacgtcttccaccgattccttctcaatcttttccacagcctcgtcccgcttttcttccgcctgctgccggagtccggaaaactcgtcggcaaagaggtctggcatattaggatcatatacgcgaagtttctctgatttacgaccaaagagctgacggttcagccatgcgacctgagccgtcaactccttgatacgttcctgcagattttttatctgttcggattgattcttattagtagtagacaatgaggctatagaggcattcagcccttctatcgtcttgagtaaaatttctttttcttccattgtctatacttcttttaatgatgtaaatatactaattaacagtgaattatgcaacaatatccaaagtttactcacgcaaaaaacatgttatacatggtattccttacgttcggctcttaaccgccggagcctctgttccgggttttcctgtattccttcaaccatcatcaccagatcgcgccactccatgggatagctgtttgatttgggatcatactccggcagcttgaagcgaccggcctccagacgttttacatacattaccatacctccgtcttcggcatgaaggagtttcattagtctgcggctggaaccgatgaagatgaagacatcaccgttcctcacttcactgttcattttctcatgtaccactccgcatagcgaactgatacccttgcgcatatctgtcctgccaggacacaggaagtagcgcatcgtgtcgttcaggttaaacatgaccgtctcgaagactttgggtaaatatttccttcagcaaatcttcagaaccgctcccgaagtgggcacgaagtccattgggaaacagcagcgcaacaccatgcggcaattgttcttcttgggaagactccgtaaatgcctgtttaaaactgataggagccaactcgtgtttgatactgctcctgtcaacggaacattttctacgccagtagtgataggttgaataacttacacctatctgttgaaggtacgacttcaacggcagctcgctttgttgcacctgcaattctaattcttcaaattcttgtctgttcataataattgaggtttgattgtattcactgccgcaaagctacaaccaaacctcaaagtgtaaaaggtgcatttcttcgaatgcttacgttgaacccatatgttacaatttatatcagttacaagattcctccttttgccttgtcagtacacattccggatgtttcaacttccatttatgtggaagtagattcaaaagttcttcttgggttgcctttttgtgataaggcatttgtgcgataacatcgttcaggtataccctgggatttaccccgtgcgccttacatgtggccagcagagaacatatgacagacatattaaccgcagcttcgtgattaccacagaaaagaaaattttttctgctcagagtgatgggccgttggacattttccgccagattgttgtcccagtacaggcggccatcgtccagacatctcataatattatcccatttggtataggcatatgttatggccttgcctgtcaaagaacttggactgtatttaattccttctgtctccatccataccttcattgcctccatgattggcctggacagttcctgacgcgtctgtctgcgctcatcatatgacaggccggcttcgtcacactggcgttctattttatagacatgctgtatctgagtcagtgcatgttgcgccatctccctgttttcatccaaagcctgctcaaaatgacggcgtatatgcaccaggcagttgagtagccgcacgtcggggttggtcttgaaggctgtttcataacctgcaaaaccgtcacattgaagatatcccttgaagttatattgatttgccagggattcgatgaccgctccggcccgtgatcccccgtcgtaatggaagatgaccagtttctccatgactgatcttaccatccagagatattccttgtcggctctgtgtttttctctgttaatgaccggaactgtagtttcatccgcctgtacatagtcacaggagaagacttcccatttgagttcttcatacagaggcttaagcagttccacggttttcttgaaccagccgtccagtgtactttcggtaaggcctttcattccaagatggcggtattgctgtatctgacggtagaacgggacatgatattcatacttctgaagcagtatctcggtaagcaggctggtgtcagcaatgcacttgtcgaccggcatcagcggcatgggagctatctctacgcctttctgtccggctggaggaagcagggtactatccttgagagcatatttgggacggatgatcaccttgacgtaaagcattcccggcttgtgtttgacgacttttgttatctcttcgcctattctacggtataaagacaagtctacgcctttcggttctattgtatcggtttccaatacgggcaagtcctctatcattttgcggttctgacgatttcgttttacgtcttccaccgattccttctcaatcttttccacagcctcgtcccgcttttcttccgcctgctgccggagtccggaaaactcgtcggcaaagaggtctggcatattaggatcatatacgcgaagtttctctgatttacgaccaaagagctgacggttcagccatgcgacctgagccgtcaactccttgatacgttcctgcagattttttatctgttcggattgattcttattagtagtagacaatgaggctatagaggcattcagcccttctatcgtcttgagtaaaatttctttttcttccattgtctatacttcttttaatgatgtaaatatactaattaacagtgaattatgcaacaatatccaaagtttactcacgcaaaaaacatgttatacatggtattccttacgttcggctcttaaccgccggagcctctgttccgggttttcctgtattccttcaaccatcatcaccagatcgcgccactccatgggatagctgtttgatttgggatcatactccggcagcttgaagcgaccggcctccaaacgttttacatacattaccatacctccgtcttcggcatgaaggagtttcattagtctgcggctggaaccgatgaagatgaagacatcaccgttcctcacttcactgttcattttctcatgtaccactccgcatagcgaactgatacccttgcgcatatctgtcctgccaggacacaggaagtagcgcatcgtgtcgttcaggttaaacatgaccgtctcgaagactttgggtaaatatttccttcagcaaatcttcagaaccgctcccgaagtgggcacgaagtccattgggaaacagcagcgcaacaccatgcggcaattgttcttcttgggaagactccgtaaatgcctgtttaaaactgataggagccaactcgtgtttgatactgctcctgtcaacggaacattttctacgccagtagtgataggttgaataacttacacctatctgttgaaggtacgacttcaacggcagctcgctttgttgcacctgcaattctaattcttcaaattcttgtctgttcataataattgaggtttgattgtattcactgccgcaaagctacaaccaaacctcaaagtgtaaaaggtgcatttcttcgaatgcttacgaaccacatatgcatggtgatgatattggtagacacaatccccgggtcggccgcattcacaacaatacctttgtgcttgacgcgactggccaagtcgatggtgaacagagtcaatgccagcttcgtgttgctatatataggaatgcgccaaaagccacccttctttccccggaggaaaaaatccggaaagtcaagatgaccgatggcatacgtacaagataccatattcacaatacggctcccctctcccatcaatggcagcagcttgcgggtcagcaggtaaggccctacataattgacactcaccgtccgttccagtccgtcttcggtaatgcggcgttccgtttccatggttccggcattgttcatcaacaacgccaacggctctccccgcttcaacagatgctctgcaaatgcggccactgaagccagagatgccaaatcaatgggagcagtctcaatacgcggattaccggtttcacgcatcagcagttgccgcttgggttcggcagcttgggggtcacggcatgccatgatgacctgatagccggcagttgccactgcgcgggtaatttccatgcccatgccaccgtctgccccggttataacagctaaattcactttaataattaaaaattgaaaattaaaaactaaaaatcagcctttcgcttcgattttctctatctcccttttcagacaaggtggaagctcctccttcaaatgctgatggcatgccatctcgatggaatacatccgggcaatgcaataattactatgctggcagttgcaacgtgcattctcttcggcacgcatgcggttgacgaaccccggctcattgagcagagcacgtgccatttgcacagcctcgaagccgtcatccagcacctcatctatcttgtccctggaaaccaggccacccacataaaccaacggtatcttcaaggcggcacggaatttcaaggcatcttccaggaaataggcttccttaaacggtacgctcggtatcatccatttgcctaccatgcgtacaccgtatttcaaccaccagcaggtcatgtaatgcgtcatgctgcggataggcatttcgccccgcatgacatacatcggcgccttactgacgaacccaccgctcaagaccagcgcatgtgctcccgactgctccagcctccgggccacctgcatcgtctcgtccagctccatccctccacggaaaccgtcgcgcatgttcatcttcaccagcacagccatatcactgccggcagccttcatcacttcttccatcaccatatccataaaacgcatacggttctgcaacgagcctccgaactcgtctttccgatggttggtggacggggacaagaactggctgatgagatagccatgccctgcatgaatctctacagaatcaaatccggcctcccgtgccagattcaccgaacgtccataagcgcgcgccatctccggcagctcatcggcacgaagtccgcgcacaaaagtaggagaataaagattgaaaccggaagatgcaccgacaggcatacaaccgcaaatactcttatgggacatattgccacagtgtcccaactggatgcctgccgcagccccctccgcatgtatggcatcagtcagcctacggagtccggggataatctcaggacgcatccacaactggcggtcaaaagacaagccgctctgagtaactgccgcataagcaacagtagtcatacctatacctcccgccgctaccgaccgatgatagtcgagcaacatgtccgacggagcgtttccgggacacatgctctcgaaagcagccgaacggatggtacggttacgcaaagtcaacggtccgaaagtgacgggggtgaataacttggattccatcgttatgagttatgagttataagttatgaattattcattttccattttcaactctccattttccattaataaagaaatggaatgatgcgtttgcgctttcctaccgcctcatcaccaaactcctcccgataacggcggtgaatggcatcggcacggggaacaaggttggcaaacgtccaccagacgaacacccaggcggcgggagaagctgtgagtatggcaaaccccgtccattccaccagttcaccgaagtaattggcagaagtgacgtatcggtaaagtccttttccgggaagataatgcttcgtatcacccggcctgcgcagatgacgtatcacatagtcagaatgcaaattgacgaacatacccgcaaaaaacagaatgactcccaacaaggcatgaggtttcaacaaataggcccagccatcggcatacaagccttcgggagcgaaatagaacaaaccgcccgcctgcatcatcccgttcaaaaggttgaagacgatacccatcgccataatagctaccggcatccggcttttacctttcagcaggaacggaaaaataaaggcccgctgaagatagtgcaactgaaacagcaggaagaagaaatataccggcacggcaaatcccgctccactcttcccccacaacccaaacatgacgatgaataccggcgcttccataagcacccacgccaatttattattgatggagattccccacgaggcagtacggaacatgccataacccgctttgacaaaatagagtgcaataaagacaaccaatgccacagcactcattacccacagaaatatctgaaaagtttcctgattcatagttctttatttatgcgaagcaaagataaagaaaactcacaacaaacaaatcgttttccccggataattgttttttcatgcaaaaaccagtgttttttactgagaagattaagcagtagagatacgaaaatctaatcgttccatcatggagtaaatttcattccaccatggagaaaaaatcgttccaccatggtggaacgatttttcccccgtgatggaacgatttaaaagatacaagtctaatccttaccgtttcttaatgggcacataagccacctcatccaaaacattcttataggcaggacggataatacgcttaccttcaaagttcaattcttcattgcgatgtgcacaccaaccgacaatacgtgccatggcaaacaaaggcgtgaagatttcctgcggcagcccaatcatctcgtagacaaagcccgaatagaaatccacattgctcgaaaccgtctttccattattcttcacacggccaaacacatcaatggcgcgctcctcgagcagttcaaggaaagcgaactcacgttctttccctttttcgcgggcaaggtcgcgggcaagctccttcagcagaatggcgcgcgggtcggaaatggtatagacggcatgtccgataccatatatcaaaccggtcttgttatagacttccttgttgagcatgcgggtgaagtaagtatcaatctcatccacgttcgtccagtcctgaatgttttcctgcagatggtggaacatatcggcaacctgaatattggcacctccatgaagcggccctttcaaggaaccgatacctgccgctatcgaagagtaagtatccgtcccggtagaagaagtgacacgtacggtaaaagtggagttgttaccaccaccgtgctcggcctgaagaaccaacagcaggtcgagtgtgcgggcatccagctccgtgtagtccttcttcagcatatagaggaaattctcggcaatggaaaggttttcctgcggatggcggatatgcaatgaacggccatgggtggcatggcgaagcatgttataggcatacgcaatgatggtcgggaatttcgaaataagctcaatgctctgccgcatcagattatcgcgggaagtgtcatctgcatcagggtcaaaacgatacatctcgagcacgctgcgcgccaggatgttcataatgttgtttccttcaagttcaatgatattcatcttggtcttctgttccagcggcatgttgtcgttgatgagctcacggaaagaagagagttcttccttgtcgggcaggcgaccggaaagcaacaagtaggcaatttcctcaaaaccgaaacgcttctctttgatgatggcgtgtgccaagtcatccacatcataaccgcggtagaacaatttgccgggaataggcttcagccctccaccggggatgcgttcatagccgaccacattgcctattttggtcaaccccaccaagactcccgtgccgtcctcattacgcaaaccgcgcttcacatcaaacttcctgaacagttcattctcaatccgggtagcttccttcaaatcttcggaaagcttgtaaatcagatactccttcttcataatcgtttcgttttattcgttattcccattttctattctccttacaatctcccgggtgaaagccgaagtggacagcgagacgccacccggcataaaacgggccaagtcggcagtagcacgggcttctgtgaaactttgctccaaggcgttctctataagagaggctgcttccttccaacccagatattcaagcatcatcacagcggaaaggatgatggaacagggattcacaatgtctttcccggcaatgttcggagccgtcccgtgagtagcctcaaaaatggcatgccccgttttatagttgatattcgcacccggtgcaatgccgatgccgcctaccatggcagccagttggtcggacacataatcgccgttcagattcaacgtggcaatcacggaatattcttcagggataagcaacgtgttctgcaagaatgcatcggcaatgcagtccttgatgaccagacgcccttctgccagctctttaccaaactcacgttctgccagttcgtacccccacttcttgaagccgccttccgtaaatttcatgatgtttcctttgtgtaccaacgtcacggaaggcagatgatgctcaagggcgtattggcaggcggcacgcaccaagcgctctgttccttctcttgaaacgggcttcacgccaaacgaggaggtttcgggaaaacggacttttgtcacccccatgtcatcatggagaaaacgatagaacttttcagcctccggagttccggcttcccattcgatgcctgcataaatatcctcggtattctcacggaatacgtacatatccaccttctgcggctctttgagtggagaaacaatgcccttataccaacgtaccggacgttggcagacatacaaatcgagcgtctgacgcaaggctacgttcaaggaacggatacctccgccgacgggagttgtcaaaggacctttgatgcccaccttataggtacggaaggcttccatggtttcgtccggcaaccaggaaccggtttcgtggaaggcacgttctcctgccagcacttctttccattcaatgccacgccggtcaccataagatttcttgacagcggcattcacgacagcctgcatggatggggtcacttctgctcccaccccatcgccggtaataaaaggtacagtaattttttccatattctatcttgcattaagtgcagaaccggcccggaaccaggctatctgctgttcgttatacgtatgttgtacttcaaaactttctttactcccgtcctcgtgatgaagaaccaccttcaacgtgcgtcccggagcaaaatctttcaaacccatgacagaaatcaggtcgcgttcccgaatcttgtcataatcggccttatccgtaaaggtcaacgccaacatgccttgtttctttaaattcgtctcatggatacgggcaaagcttttcgccaaaatgacgcgtacattcaggaaacgtggttccatggcagcatgctcacggctggaaccttcaccataattctcttcggcaacgacaatggaagggatgccttcggatttatacaatttcgccgtgcctgacaccgttccataggtattggtagagcgattccagacactattcgtctctccattgaaagcattgacagctcccatcagcatattatccgaaatattctccagatgtccccggaaacggagccatggccctgccatggaaatgtggtcggtggtacatttcccctgcactttaatcaataaaggcatattcagcaaatccatgctatcccaggcagggaagggagtcagcagttgcaagcgctgtgaatgaggattgaccgtaatttccgtctgtcctttgcctggagcaatgtatccttcctttcctcctataaacccgtgtgccggcagttcttcaccgaccggttcggacagtttcacaacctctcctttggcattgaccagcgtatccctcaacgggtcgaaacaaaggtcaccggcaatggtcagcgccatcgttatctccggggaagcgacgtaagcaaaagtgttgggatttccatcggcacgtttggcaaaattacggttaaaagaggtgacgatggaatttttgcgttcggggtcatcagtatcgcgcttccactggccaatacaaggtccgcaggcattcgccattatcgttgcgccaatatcttcgaaagcggcaatcatgccgtcgcgttcagcagtggcacgtatctgctccgaaccggggttgacaatcagcggagaagcaaccttcaaattcttttcctttacctgccgggcaagggaggctgcgcggctcaaatcctgataggacgaattggtgcacgaccctatcaggccgacttccatccggcggggatagttattggttatcactacctcggcaaatttcgatatcggtgttgctgcatccggcgtaaagggcccgttgatatacggttccaatagcgagaggtctatttcaatgatgcggtcgtaatatttttccggatttgccagcacttcgtcgtcggcgcgaaggtcggcagctacggaagcagccatttttgccacttcttcacgtccggtagccttcaagtaggtacccatacgctcatcgtaagggaaaagggaggtagtcgcccccacctctgcccccatattgcagatggtagcctttccagtggcagacaatgaagcggttcccggtccaaaatattcaatgatggcattggttcccccttttacagtaagaatacccgccaacttcagaataacatctttgggagctacccagccactcaatttacccttcaagtgtacgcctatcagacgcggcattttcagttcccattccatgccggtcatcacatccaccgcatcggcaccacccacaccaatggccaccatgcccaaacctccggcattgggcgtatgagagtccgtgcctaccatcattccacccggaaatgcgtagttctccaataccacctggtgaataatgcctgctcccggctgccaaaaacctatgccatagcgggaagaaacatcacggagaaaattatagacctcctcgttggtcttcgtagcagtcgcaacatcttcttttgcacctttatatgcttgaatcaaatggtcacaatgcacagtggaaggcacggcaacctgctcacggcctgcattcataaattgcaataaggccatttgagccgttgcatcctgcatggccacacggtcgggacggaaattcacatagtcttctccccgtctgtagttcttcactttatccccatcatacaaatgagcatacaaaattttctccgctaaagtcatcggacgccgcagtacgttccgtacgcgttctatcttctccgaataagcggcataaaacgttttgagcatcgttaaatcatataccataaccactattttttagtttttcattattgtaaagattacaaattaatatcataaacaaataaaaaggctgaatagtttaacaaaataaagcattttttccgtcggaagcgaagaatgattacctttgcaaccatgaaggaacaagattcaaatagtcctattattcacctccagcagcaacaacttttgctgcgcatggaatacgaatacgaaaaagaggaattcaaacgccaaaccgaaaacatgggagttgcccggaaagtgaaacggggactttgctggtatcctgccactccgggacgaagttactataattcactgaatcaattagtaatagaaattacacacacagaaaataccgatatagaacataattttgagttcggccgtcccgtatgttttttccgccagtctgccgatgggaaaataacctatatgaacttcaccgctaccgtaagctatgccgacgagacacggatggtagcgataatgcccggagccggtgccgttatggaagtgcaggaaacggacaacctcggcgtgcaactttatttcgacgaaacatcctatcggaccatgttcgaagccttggaagatacgttacgctccaaaggcaaccgcctggccgaattgcgggacatattgctgggaacctcgaaagccggtttccgagagctctaccccgtacggtttccctggctgaactccacgcaggagacagctgtaaacaaagtgctgtgtgcccgcgacgtggccattgtacatggtcctccgggaaccggaaaaacgaccaccttagtggaagccatctacgaaaccctgcatcgggaaccgcaggtactggtatgtgcccaaagcaataccgccgtcgactggatttcggaaaaacttgtggaccgtggcgtcaatgtcctgcgtatcggcaatccgacccgtgtcaacgacaagatgctttcctttacctacgagcgtcgtttcgagaaccatccactttatccggaactgtggagcatccggaaaaatctccgtgaactgggcagccgtgcccgccgtggcagctatgacgaacgcgaaggagtacgcagccgtatgagccgcctgcgcgaccgcgccaccgcattggaaatacaaatcaattcagagctttttgatggggcacatgtcatagcctccacgctggtaagcagcaatcaccggctgctgaacggacgccgtttcggcacccttttcattgatgaagcagcccaggccttagaggctgcctgctggatagccatccgaaaggcagaccgcgtggtgttggcgggtgaccactgccaacttccgcccaccataaaatgctacgaagccgcccgtggaggtctggaacgaacattgatggagaaagtggtgtccaacaaacctgccgttgtctctttgctgaaagtgcaataccgcatgcacgaggaaatcatgaaatttccttcccaatggttttataatagcgagttggaagccgctcccgaagtgcgttaccggggcatcctggactgggatacccccatccactggattgacacctccgaaatggatttcaaagaagaatttgtgggagagactttcgggcgcattaataaggcggaagcggacctgctcctatcagaactgaaaatctacatcaaccgtatcggtggcaaccgcattctggaagaaaaaatagacatcggcatcatctccccttacaaggcacaagtgcaatatctccgcagcaagataaaggcagacgcttcactcaagccttatcgcagcttgttcactgtaaatacggtggatggcttccaagggcaagagcgcgatgttatcttcattagccttgtccgtgccaacgaagaaggacagataggattcctgaatgatttaaggagaatgaatgtagccatcacccgggcacgtatgaagctggtaatattgggagaggcagagacgctgaaacatcacggtttttaccggaagctattggagtttattcaaaatatagggaatcaataataaagaaataccccctccggtaacaccgaagagggtatttcacctatttatataaagctgattaattgttttccggacgaagtttacgaactgtaacagctgtctgccacatttcgctttcacgcaaggctttcaattctgcattcagcttctcacgataatcgggtttggagttactgtcgatagaaatctgggcttcgttgcccgacttcacacttgcatacaatttctgtacaaccggcttgatggcatcatggaacggggtcatccaatccagcgcaccacgctgtgccgtagtagaacagttggcatacatccagtccataccgttcttggcaaacaatggcatcaaagattgagtcaactcttccactgtttcattgaatgcttcagaaggagtatggccgttttcgcgcaatacttcatactgagccaacagcaatccctggatagcacccatcaatgaaccgcgttcaccggtcaagtcggaagtggcttcgcggatgaaagttgtctcgaacaaatatcccgaaccgatgccgatacccagtgcaatcgtcttgtcaaaagctttacccgtagcatcctgatagacggcatatgatgagttcaagccacgaccctcgaggaacatggtacgaagtgaagtaccggaacctttgggagcaaccataataacatcaatatctttaggaggaaccacgccggtacggtcgttccaggtaatagcaaaaccatgagagaagtaaagagcctttccgggagtcaagtaaggtttgatagtcggccatacagacattacagctgcgtcagacaacagacacatgacgatagtacctttctgacaagcctcttcgatgccgaacaaagtctcacccggtacccatccgtcagccacagccttttcgtatgtcttgcccggacgttgtcctacaatcacattgaaaccgttatcacgcaagttgcaagcctggcccgggccttgtacgccataaccgattactgcaattgtttcatctttcaaaatctcacgtgctttttccaaaggaaattcttcgcgggtcattacattctcaataacaccaccaaaattcaattgtgccattttttgttttaatttttatttgtggcttacgccaacgttgataaatttatttatttctctgtaaatatcactttagagcgacagaccacttcgctgccattctttttcacctccacatcgtaaacgccctcaccggcatcatccatgaacaaagtcaactcatccccataatagctttcggctacatatgccatttcaaaacgacggatgcgcttctccttatacatctctatcgggaacaaatcaaggatatgctcgatgtaacggatgctgttcacatgcccgttaatgtcaatatcactgtatttggctaccaaagcagcaaccggttcctttgaggccacctttatccgcgaaggtttttctatcgggcaaggctcatcgcaaacataatctacaatgctgccactatgaagagccagcaaatctgccggcttacgggtattcatgctaatcatcgcccaaacggaacgtgcatacccaatcttcttgccctccttatcgatgatagcgaaattacggtctgtaaaaaggcgatagacattctccacccaagtctgaatggagaaatcttcgtactgataaggcatttcatccagttcgacagccagacgggacaatacccaagtataattgtcctcgtttagagtcgcgatgccaaaaccgcggtcgctggcatggaaacccgcacaattcaacaaatggttgcccaatactcccattgtcagccgtccggtaaagtcgacatgaaacggttcggcaacaaacttgtaggtacctattttattgttctcgctcatcatgattcctggtgtttactttgacgatattttgcttcacggtccgccagatattcattgacacgttcaaagcagctggtcgtaatggctacgcgacccgaacggacgaactgaagtacgcaatccaactggcgcaactcctcataaagattggttatttcctcactcatgccattcttctcaacaatggcaaatacagcattcacctccacaatacgggcattgtacttacggattactttggacacctccggtttttcttccagcgtaggggtcgttattttataaagggcaatctcgtgctgatagatttcatcatccgtgaaataatgggcttgcagcacatctattttcttggtaatctgcttggtcaccttttcaatggtatccttgtccgtccaagcggtaatggtatatttatgtacccccttgatggaggaggccgatacattcaaactctcgatgtttatctgccggcgggtaaacacagccgtcacctgattcagcaaaccggcaaagttttccgaatgaacaatgattgtatatagttttttatccatagatagagtaaattctttaatttcgcatgacttcagcattccaacaacatctgattgaccgccccccccggaggtgtcatcggcattacatttccttcttcctccacacaagcttcgagcaggaacggtccgtcagttactatcatctcttcaatcgcttttgccaactcctcacgggtcattaccctgcgtgcaggaatatcatatgccgaagcaatcttcatataatccggattcatcatcggagtaaacgaatagcgacgattgaagaacatcgcctgccattgacgaacattacccaagaagttattgttcaacagaatcatcttcaccggagccttttgttccatgatggtacccagctcctgcaggttcatctgcaagccgccgtctcccatgaatacgcataccgtgcggtccggacgtccaaaagtggcaccgatagctgccggaaggccgaagcccatagtacccaggccaccggaagtaacaatgctacgttccttgctgtatttgaaataacgggcggacatcatctgattctggccgacatcagtcaccaatatcgcctcgttatgggtagcctcactcacagcacgcaccacctcacccatgcttagcgcttttcctgccggatgtaattccggacggattaccttttcctcttccacttcctcgtattgccggaaactgtcaatccattcctgatggttggcgggttccagcaattgggtaacggcagccagtgtctctttgcaatctcccaggacagcaacatcggtctttacattcttatctatttcggcagggtcaatatcaaagtggataatcttcgcctgcttggcatatgtttccaatttacccgtcacacggtcatcaaagcgcatgcctacggcgataaggacatcacatttattggtattgatattgggccccaggttaccgtgcataccaagcattcctttgttcaacggatggttcgtaggtaatgcggaaagtcccaataaagtgcatccggcaggcattccggctttctcaatgaaagcacgaagctcttgctgggcttctcccagctccacgccttgtcctaccagcaccaaaggccgttccgcaccatttattaattcagcagccttccgtatggcctccggctccatttcgggaacgggaagatagctacggacatagtccaccttagtaggcgcatattctgttttctccacttgggcgtttttagcaaaatccagcacgaccggtcccggacgtccgctctttgccacatagaaagcacgtgccactgcccaggccacatcttctgcacgacgaatctggtaactccatttcgtgataggctgagtaatgcctaccaagtccacttcctgaaatgcatccgtacccaagaagttcgtccctacctggccggcaatgacaacgataggcgtactgtcaatcatggcatctgcaatgcccgtgatagtattggtagcaccaggtccactggtaaccagacaaacgccaacctcgcccgacacacgtgcaaagccttgcgccgcatgggtggctccttgttcatggcgaaccaggatatggttcaattccttccggtggtcgtataaggcatcgaataccggcatgatgctccctcccggataaccgaaaatagtctttactccctgatgctccagagagcgcatcaatgcttctgcgcctgttattagagcctcaccccgaccctctccttgggagagggaggaaaagttactctttttattattatcagccatactttatctttttattaaaaacttcggaaatttgtatcattccctcctcccctctctttcggagaggggtcgggggtgaggcctttaatcaatcaacctcacagcccctttgtcagcggaactcaccatactggcatatgctttcaatgctttggagacttcacggttgcgggttaccggagtcatagggcgtgctgcaagctcttcatccgtcaacttcacattgatagaacggttcggtatatcaatttcgataatatccccatccttaatcttaccgatattaccaccggcagccgcttcgggagaaacatgtccgatactcagtccggaagtaccaccactaaaacgcccgtcagtaatcaatgcacactccttacccagatggcgggatttgatataagaagtaggataaagcatctcctgcatacccggtccacctttcggtccttcgtgagtaatgacgacgacgtctccactgactacctttccacccaaaataccatcgcaagccgcatcttgtgagtcgaaaactttcgccggccccgtaaatttccagatactctcgtctacaccggcagtcttaacaacgcaaccgtcctgagctatatttcctttcaaaaccgccagaccgccatccttgctgtatgcatgttccaaatcacggatacaaccggtcgcacggtccgtatcgagttccttataagacgcattttgtgagccgagtaccagattgaactttccggctgccgcactggagtatttcttgattgcctctttacatacattagggctggtaatactataccggtcgattgcctctgccaacgtcattccatccacacggcggacattcgtatcgaccaatccgcccttggcaagctcatccatgatggcaatgatgccaccggcacggttaacgtcttgtacatgatacttttgggtattgggagccaccttgcataagcagggggtcttgcgggagagcatgtcaatgtcgtccatcttaaaatccgctccagcttcgtgagccacagccaacaaatgaagtaccgtattagtggaaccgcccatcgcaatatccagcgtcatggcattcaaaaatgcctcgcgggtagcaatactgcgcgggagtacactctcatccccttcttcataatatctaaaggcattctctacaatcaacctggctgcatcctcaaatagtttcttgcgattttcgtgagtggctacaatcgtgccgttaccgggcagtgccaatccaatcgcttcattcaagcaattcatggaattagcggtaaacatgcctgagcagcatccgcaagtggggcaggcatgttgctcaatctgtgccacctctttatcgcccacactttcatcagcagatttaatcatggcatcaatcaaatccaaatgctgtccgttccattccccggcttccatcggaccgcctgaaacaaacacagtcggtatattcagcctcatagccgccatcagcatccccggagtaatcttgtcacagttactgatacaaaccatagcatctgccttatgggcatttaccatatactccacactatcggcaatgatatcccttgaaggcagggaataaagcattccgtcgtgccccatagcgataccgtcgtcaatggcaatcgtattgaactccgcagcaaaacatccccgcttttcaatctcttcctttacaaactggcctatttcgtgcaggtgtacatgcccggggacgaattgtgtaaaggaattgactatagctataatgggcttacccatctgttctttcttcataccattcgccgtccacaatgcacgggctcccgccatgcgacgaccttgtgtgctgaacgagctgcgtaactgatgcttcattttcaaatctccttttaatgaaaaagcctctcccactatagtgagaaaggcttaataaattatcttctaacatacgaatacatacataacctttctcacgctcttgatgccaccaccacgacgcgaataatatgcaggactgccaggttaatagatgtatgtaaattcataacttaattcttcttttttgtttcaaatgtgctgcaaaggtaagggcttttttataatctccaaacaaattgaataaaaaaataagataaatatgaataatcgtaagaaaatatcgtcctaaaatcctattttatcacttaacagttctaaatagaaccattcggacagccaatgtaaatgtattgccaatcattgaaaccatttaataatctgaaaattaccaaaggctctctacatcccgaaacaaataattcgtatctttgtctcttcaaatactcaaaaaaacagtatttactaattaaataaagatagaaaattaatggaaacagtagaaaacaagtacatcaccgtagcatataagctgtactcaatcgaaaacggagaaaaagatttcgaagaagaagcacccgtagagcatccttttcagtttatctcagggctgggaatgacactcgaaccctttgaatcccagataaaagacttgcagataggcgataaattcgactttaccattccggcatcagaagcttatggtgaatatgacgacgaccatgttattgacctccccaaagaaatctttatgatagaagggaaattcgacagcgatcgtgtagtagaaggtgccgttatccccttgatgacttctgaaggtcaacgcatcaacggaagtgtggtagaagtgaaggaagatatcgtcgtaatggatatgaaccatccgctcgcaggttgtgacttgaacttcactggagaagtagtggaaagccgcctggctacaaacgaagaacttgccgaagtcgcccgtatgatgggtggcggttgcggcagctgcggttgtggtgactgtggcgatggatgcggcgaccatgaatgtggaggcggatgctgccactaaagaattaaaaattaaagaattagaaattaaggaaccaagctacactgtattaagcatgccgcatggtaattctttaatttttaattctttaatttctatattatttacttgtcattatttccaataccaacttatccgtttcattcattcctttggaacctatttttgtcagattgcggatactctgatccacatcctcatcaataataccttctacggaagttacacaacggttttccatggccatgatggctgaaagcactgcggttgaaactccggtagttactttcaaggcacaactgggtttggcaccatcacaaatcattccggtaagattggcaatcatgttctgcacagcatatgccacttgttcataagttcctcccattagccaggttataccgcaactggaacccgtggcagcaaccacacaaccgcataaggcggataaccgtcccaaactctgcttgatatagattactgtcaaatggctcaacatcaaggcacgtatcaattcttcttctgatttcccgttttcttcggcatagactagtacgggaagggtagcggatatcccttgattaccactgccggaattactcatcactggaatcatagctcctgccatacgggcatcacatgctcccgaagtgtaagaaaggatatgagagaagacactgtcgcccataatccggtgttcgtaagtgccacgtaggattttacccagaccatgaccgtattcaccttcgaaggaacgttcagcggcagtcttgttcagtcgtgccgtatcaagaataaaacggatgtcgtctaatggggttgtcatggcgaagtcatacactttgcgtaaagtcaagtccaatacatcctcctcctcttcgaagcaagaagcggtttgtttgtccagcaggatgtccccgttgtgcgttatataagtaaagcaagtatgtccaccagcaataatggcggttgccttgtccgtatcggcttcacagcagacttctatataaagtttctcttctatatcgtcttttaaggatatatggatacgcttttcttctatgaaacgctttcctgcctccactgcatcaggggtactgtctttcaaaacctccaattgatatgccgacttgcctattaaagcgccaagtgccacagcaatcggtaatccaatcatccccgtaccaggaatacccactcccattgcattcttcagaatattggcactcagcaatacggttatcttttcgggacgcttattcaacacttccacagcctttgctacacacaatgctacagctataggttctgtacaaccaatggcagggacgacctcgttcttgacaagggtaatgatttgcagtctttccgtttcagtcatatttattcaaatttgatgcaggcaaagataatgtattttattctataataaaacgaacaaaaaaataaaaaagaggattccaagcacagaaccctctttatagataaagaaaaatcttttcttattttttataagaattgtcaccaagacttatacctaaattgaatctggtagtaacattccaaattccttctatttcagtcattgagttcaaggctgtcagcatctggatcatattccacaaaggtatactctgtccccagaattcaatgttcgtgttctttaacaacatatctacatcaggtaacatcggatagagagcaggcataaaaatatcaaataaatccttatccagatagatagagagatcatttaccgttcttacgagctcttcctcgttctttatctccaattgggtagttctatagttcaaggggaaaccatcgattacatagccaatcagtttttcaatatcactatcggaaattttagaaatatctaactttttcagcatattatcatcttcaagtccagccaacaactgacccaacaaattcttgatgtcagctccactcatgctcttcaccatttctataatctgcaaaatagcttccggagtcacttgagaatcctcagcatctttcaatgcttcggttacaatggcaggaatattcagcacaacatagatatgctcacccttcacataccaataagccagatttgcaggagaagatttccaaacaatgccgtccgttgaagggagctgtcccataccggccataatcatctgatccatagtaatgtttatttcttctgcatagctggctacaatagaaccgtcagctttgaactccacatctttcaaaagctgtatcatagccgcagataggacatttgtccctactgtcgagatattatccgctgcaatccctgcattaccaccttctccataaggcgatacccaagtcaatcttcccggagcataaatattggttctatctttagaatcagcataataaacagcatcacacaactgatatttcttcacgatatctcctacaaactccgtagaaaccgtaactgcagctttcccttctaatgtgatagtacccgaaactttcacattcgtagagctaagcagcacccaagccgccttagtagcaggcgttacacttttctcgccttgaaacttaaaagtaccgtctgtctgttcaacaacagtcacattaatttctatttcatctgcacctctaaccactttattcaacgtcaaaataccattctgcgcatcggtcatcgctaatttcatactagcatcagaacttgttggaatattagtttccagttccagattttcagctgtaataatctgattaggcactttcttccaattttcatcgtcatcatcactacaagccgtgaataaactcattgaacagatcaatgcaaataaataaaataaattctttttcatacttttttgagtacttgtttagttaataaaaagcttcccaagggagctattaatttcccattttaaattaaaggtgcaaagtaacactttttaaggttacagtacaaggtcttttctaaaaaatagatgttccttttttcatcattacgagtgaaattccgatgtatatttcataaagagtaagccatttttataaagaacaaaccattagccaaactctggtaaaggcaggcaactttatacggaaaggattttttatcttatttccttaaacgttttatgaaaaaagttgttatctttataaagtcaaaagcatttcctataaagcgtattggcacattaacctcatatataaacctttaaagcatttgatatgttcaactcatttggaaatattctccgtcttaccagttttggggaatcacacggtaagggtgtgggaggagtgatagacggattccctgcaggaatagccattgatatggatttcgtccaggcagagctcgaccgacgccgccccggacagtcacgtatcactactgctcggaaagagggtgacaaagtggagttcctctccggcatcttcgaaggaaaatccacaggctgccccataggattcattgtatggaaccaaaaccagcattctgacgattacaataatctgaaagaagtctaccgcccgtcacatgccgactatacttataaggtaaaatacggcatccgagaccatcgcggaggcggacgttcatcggcccgtgaaacaatctcgcgtgtagtggcgggcgccttggccaaattggcactaaagcagttgggtatacacatcacggcatacacttcacaagtaggctctatccgccttgaagagaactataccgcatacgacctcgacctgatagagaccaatccggtccgctgccccgacccggcgaaggcgaaagaaatggaagaactcatcttcaagataaagggagaaggagatactatcggaggagtggtgacctgtgtcatcaaaggatgccccatcggactgggacaacccgtattcggcaagctccatgcggcactcggagcagccatgctcagcatcaatgcagcaaaagcattcgagtatggagacggtttcaagggattaaagcaaaaaggctcagagcagaatgacgtgttctacaacaacaacggacgtatcgagacccgcaccaatcattcgggcggtatacaaggtggaatcagcaacggacaagacatctatttccgtgtagccttcaaacccgtggcaaccgtactgatggagcaacacaccgtgaacattgacggtgtagacaccaccctgaaagcccgcggacgccatgatccgtgcgtattgccacgcgcagtacccatcgtggaagcaatgacagcaatgacattgctggattattacctgattgacagaacaactcagctataatattcacctatggaaataaagaaatatattacagagaacgagtctaaaatgctggaagacttgttcagcctcatccgtattccaagcatcagtgccaaacccgagtatcacgacgatatgcttgcctgcgccaaacgctgggcacaactgttgctcgaagccggagcagacgaagctctggtaatgccttcaaaaggaaatccaattgtttttggacagaaaatcgtagacccggacgccaagaccgtattggtatatgcccactacgacgtgatgccggccgagcctctcgaactttggaaaagcgacccctttgagcctgaaatacgcgacggacatatctgggcacgtggtgctgatgatgacaaagggcagtctttcatacaagtgaaagcatttgaatacctcgtcagaaacggactgctgcaaaccaacgtgaaattcatcttcgaaggagaagaagaaatcggctcgcccagtctggaaagcttctgccaagagcacaaagaactgctaaaagcagatgtcatactggtttcggacaccagcatgcttggcgccgacctgccttcactgaccactggattgcgcggacttgcctattgggaaatagaagtgaccggccctaatcgcgacctgcacagcggacacttcggcggtgccgtcgccaatcccatcaacgtgctttgccagattatcggcaaagtaacggatgcggagggacgtatcaccgtaccgagtttctatgacgatgtggaagaagttccccaagctgagcgcgacatgatagcccgcattcctttcgacgaagagaaatacaaaaaggctatcaatgtaaaagcgcttttcggagagaaaggttacagtacgctggaacgtaacagttgccgtccatctttcgacgtatgcggcatctggggcggatatacgggtgaagggtccaagaccgtgctcccatccaaggcatacgccaaggtatcctgccggttagttccccaccaggaccaccataaaatatccaaactgtttgctgactatatcttagacatagcaccggattcggtgcaggtaaaagtcactccgatgcacggcggacaaggatatgtatgccccatcagcctgcccgcctatcaagccgccgaaaaaggttttgaaaaagcattcggaaagaaaccgctggcagtgcgtcgaggtggaagtatccccatcatttccaccttcgagcaagtgctgggtatcaaaaccgtattgatgggcttcgggctcgaatccaacgccatccactcacctaatgagaatataccattggacatcttccgtaaaggaatagaagccgttgtcgaattctacctcaattataaataaaacaagaaaatcaggatgaaagacttccaaattcaagccatcggcctgatgtccggcacctctcttgacggactggacgtatgttgttgcactttccgacgacaagctggaaaatggtctttccacatagactgtgcgaaaggctatagctaccccgacgccatgaagcagatattgggtaccggtgcacagacaatgagtgctttggagttcatcactttccacagctcctatggaaagtttctcggtgaacgtgtcaacgagttcatgcaagaatttggagtccaccccgatattatcgcctcccacgggcatactatcttccatgagcctcaaaagagaatcatgtaccaaataggtgatggagccgccattgccgctgaaacccatatacctaccgtttcggatttccggcggctggacatcatgctaggtgggcagggcgctccactcgtacctattggcgaccggttgctttttgctgactacgacttctgtttgaatatcggcggcttctccaacatctcattcgagcaggacgggcggcgcatcgcttttgacatcagtccggtgaattacgtcatcaaccattactgccgtcaaataggattggaatttgaccgtgacggcgagatagcacggcaaggcaacatttgccaagaactgctggacgaactgaacggaatggatttctaccatcagtccggaccgaaatcattgggacgggagtgggtggaaacgctggtatatcccatgctcgagcgttatggcttgagtatggagaatatgctacgtaccttttacgagcatgccgcctggcaaatatcacgcatcatcaccgcccaccccttgcccgatggcaatggaaagctactgattaccggtggaggtgcattcaacaagttcctcatagaacgtatcgacgccttgtgtccgtgtgaaatcgtgattcccagccggcaaatcatagagtacaaggaagccctaatctttgctttcttgggtgccctctatatggcggacacacccggatgcctcgcctcggtgacgggagccacggcagataatatcggagggatgctgtttaaaatatagtcaattctaccattatggaaaaatcaaaagacacctggaccgtcttatccagcgaataccttcatcgggccccgtggctcactgtgcgtaaggaccatgtagtgctacccaacggcaaccacatcccctcctattatatattggaatatcccaactgggtgaataccattgccatcacccgtgatggacaatttgtctttatccgccaataccggcatggcatacaagaaacgtcctatgagctctgtgcaggggtatgcgaagaagaggacggctctccgatggtttccgcacaacgggaacttttggaagaaaccggctatggaaacggagtatggaaagagttcatgcaaatctctcccaatccaagtacccacaccaacattacctactgtttcctggctacggacgtggagaaaatctccgagcaacagttggaagatacagaaaacctgaccgtacacctgctttccttgcaagaggtcaaggaattgctgcagcaaggaagcatccgccaggcgctgatggctgctcccctctggaaatacatggcggagagaattatttaatgtgattacccttattcaaacggcttgcggaatgtgcatccggatttccattcagaacaaccgtaagctgttttccccttgataacggtaccttttccgcaaagcggacaagactgaccgacgaaatcgtcagcttgtacgggaacctccacacttgaagctgccacagcgcccaaagcctgttccgtctttttacctgcggcggcagactttctcggtgctcttttcttcggctcctttttcggcttatcggcagcctctgtcttggcagaagccttactgcccttttcgggagcagacgcttggatggtgatgtggcggttgctgttatcagaaagtacactcatcacgatttccgataccatctgcttcaattcttccaagaattgtccggcattatatgtccgcctttctatctcacgtagttttttctcccaaataccggtcaattccgccgacttcaacagctcctcatgaataatctgtatcagctccacaccggtaggagtggctatcagattcttcttttccttgcggatataattccgcttgaacagcgtctcgatgatggctgcacgggtagacggacgaccgatgccgttttccttcagcgcatcacgcagttcgtcgttatccaccagcttgcccgccgtttccatagcacgcagcagggtggcttccgtataaggccggggcggttgcgtccacttctcgtataaatcggggacgtgtggcccgctttctcctttcacaaaagccggaagcacattctcctcttctcccttctcctctttctcctcctgcgattgtaccgagggggtgccgaagataacacgccaacccggttccagaatctgcttgccggtggccttgaactctatgctctctacctcgcccaatacggtggtagtggcaaacttacaatcaggatagaatacagcaatgaaacggcgtgctatcaaatcgaatacgcgacgttccatatccgtcagattctgcggatgctggccggtaggaataatggcatggtggtctgttaccttcgagttatcgaaaacctttttggatttcaacaatgcagttcctgtcaaaggggctgtaaatgtctcgtaatcacgcagacctttcaagatgccggggcatttgggatagatgtcatcactcaaataggtagtgtctacacgtggataggtagccactttcttctcatacaaagactggataattttcagtgtctcatcagcggaataggcaaacttcttgttgcattccacttgcaaagaagtcaagtcaaacaagcgaagtggcgcctccctcccctctttcttagtgacatccgtcacagtaaaaggaaaattcttaatctgatccaatagagcaagcccacgttcgcggtcggtaatggggtcgatacctcgattctcttcttcttttttaggtttcttcccagcagctatggcctctttctgcttcccggcttccagtatcagttcctcctcacttttccggaggatggcggaaaaagtggtatcacgatagacggtcttcagctcccagtattgcttgggaacaaaattctgtatttccaactgacggtttacaatcaacgccagtgtcggcgtctgcacacggccgatagaaagtacctgccggttctgcccatacttcatggtgtagaggcgggtggcattcatcccgagcagccagtcgccaatggcacgcgacaagcctgcttcgtacaaaggctggaaatccgacgcatcacgcagcttggcaaacccctcacgaatagcttcctctgtcaatgaagatatccaaagacgtttcaccggacaacgtgccccggccttctgcatcacccaacgctgtatcaattctccctcctgcccggcatcaccgcagtttataatcatatcggcatgttgcatgaggttctctatcgtatggaactggcgctcgtatgtgggattactaatcagcttaatgccgaaacggggaggtatcatgggcaggcttcccaagctccatgacttccaattaggagtatattcatgcggctctttcagcgtacaaagatgaccgaatgtccaggtcacctggtatccatttccttcgatgtatccgtctttcttttctctcgctcccaatacatcggctatgtcacgcgccacagagggcttttcggcaatacaaactatcattcgctattttatttagtgggacaaaggtaataaaaagggggcaagaacgaaacgataagcaaggaacgataacatagacctggtaattttttctccccaaaagctgacatatgaacataaaaaaaggagtaccgccgtactccaacctttgttaaccttaaatctaatactatgaaaaacacattgcaaagatacgtacttctgataaatctgcaaattatccaactaaaaaagtatgttctataacacagattaagaaaaaaggacggatatgcaaacgcacaccgtccttttttaacatttaacgtgtcggattattcttcatccaacaagatttccaatatctggcaagcagccttggcaaccggagtaccggggccgaagatggcagctacgcctgccttgtaaaggaagtcatagtcttgtgcggggattacaccaccggcaatcactacgatgtcctcacgtcccaacttcttgagttcttcgataatctgcggaaccaatgtcttgtgtccggcagccaatgaagaaacccccactacatgaacgtcgttctcaactgcttcgcgggcagcctcggccggtgtttggaacaagggtcccatgtccacatcgaagccacagtcggcatatccggttgcaacaactttggcaccgcggtcgtgaccgtcctgccccatctttgctaccatgatacgaggctgacgtccctctttcttcgcaaacttctcagctaattcacaagcacggtggaagtcgctgtcattcttactttctgatgaatacacgcctgatatagttctaattactgctttataacgtcctacaatcttttcgcaagcataagagatttcccccaaagtggcacggacacgggctgcctcgactgccagttccagcaagttgcccttacctgtcttcacacattcagtaatagcctccaaagccttgtccacttctgcctggttacgtccttccttcagacgcttcaagttttcaatctgttcctgacggacagccgtattgtcgatttcaagaatatcaatcggagcttctttctccagacgatacttgttcacgccgacaatggtctgtgaaccgctatcaatacgggcttgtgtacgtgcagcagcctcttcgatacgcatcttgggaataccggtttcgatggcttttgccataccgcccagcttctctacttcctgaatcaattcccaagccttgtgagccaactcattggtcaaactttccacataataagagccaccccatgggtctacattcttgcaaatgtaagtttcttcctgaatataaatctgcgtattacgtgcaatacgtgcagagaaatccgtcggcaaggcaatagcctcgtcaagagcattggtatgcagtgactgagtatgtcccaatgcagcagccatcgcctcaatacaagtacggcccacattgttgaacgggtcttgctctgtcagcgaccagccggaagtctgagagtgcgtacgcaaagccagcgacttcggattcttcgggttgaactgcttcacaatctttgcccacaacatacgtgcggcacgcattttggcaatttccataaagtggttcgttccgatggcccagaagaaagagagacgcggtgcgaaagcatcgatgtcaatacccgcagccgttccggcacgcagatattccaaaccgtctgccagggtgtaagccaactcgatgtctgccgtagcacccgcttcctgcatgtggtagccggagatggagatagagttaaacttaggcatcttttgggaagtatattcaaagatgtcggagataatcttcatagagaatgcaggcggataaatataggtattacgcaccatgaattccttcaagatatcattttggatagtaccagccatttcttctaacttggcaccctgctccagacctgcgttgatgtagaatgccataacaggaagtacggcaccgttcatggtcatggagacggacatcttgttcaaaggaattccatcgaacagcaccttcatattctccaaggaacagatagacacacctgccttacctacgtcacccactacacgttcgtggtcggggtcgtagccacggtgagtggccaagtcgaaagctacggacagacctttctgtccggaagccaaattacgacggtaaaaggcatttgactcttccgctgtagaaaaacctgcatactgacggatagtccagggacgcaatgtatacattacagagtacggaccacgcaaataaggaggaagtccggcagcataacccaaatgttccattccctcaaggtcttcttttgtataaacaggcttcacctcaatgtgttccggcgttttccaatcagcatggatgccgttagccttttgccactcagcaccattgacgggttgaaaagcggcatatatatctaagtttttaaaatcttttctcatcttacttcaaaagtttagcgttgtattcctttaatgtttccagcacgttgacacggacatggataaagttctcgataccggcagccttcaagtcgtccatgcaagcaggagcaccggctacgataaacatggcacggccattcagagccttgaaggcgggaacagcatattctgcatattcatcatcacttgaacacaataccacgatgtcggccttggcagccattgcagcttctataccttcttctacggtggagaaaccgaggttgtctacaacttcatatccggcacaagccaagaaattgcaagagtactgtgcacgtgcttggcgcatggccaaattaccgatagtcagcataaacgctttcggacgtttgccggaagcctctgtttcgagacgcaacgcttcaaattcactggcagcacggtcaaagttcagtgtcggaacatctttctcgcacgtatgtccgccgccgcaacagcaagtagcctcaaccggtttcttatccccggccttttcattgaagttggggaactggttggtgcccagcaacacttccttacgcttggcgactgcagcatgacgtgccttgttgctctcgtttacggcagcctgcacttttccggctttcacggaagcatagaaaccaccgtcttcttctacagcgaggaagaggtcccaagcctgcttggcaatagagacggtcaagttctcgatatagtaagaacctgcagccgggtctataaccttatcgaagtgcgattcttctttcaacagcaattgttggttacgcgccatacgctcagagaattcgttaggagcatcataagtcttgtcgaacggagtaaccgtcattgagtcaacaccggcaagggcggcactcatcgcctcagtctgcgtacgcaacaagtttacgtgtgcatcaaacaaagtcaggttgaatgaagaagtttccgcatgaatcttcatcttggctgcacagcgacactcgttatccttacccttgttttcgcagtcgcgcagacactcaggactgtaagaagccacaatattagcccacagcatacgtgcagcgcggaatttggctatttcaaggaagtagttggaactgataccgaaattaaacttaatcttcttggctaccattgcagccggcagaccggcatcaaccaactgattcatatattcattaccccaagccaaagcgtaacccaactcctggaaaatataagaacctgcattgtttaatgtcaacgcattcacattcaacacacggtatttcggaagggaagcggtagcctcgagcagtgccttggctgttgccaccatatcacctttttctttacctttggccagcatcttgttgaagtagtcatagttgatggaaccctgcaacttcgtcaaatcataatcctttttctggaaataagcgacaagaagttccgcaagttccaccacatgcccttggcaggtagagaaattcaactcaacacattctgcgcagatatctttcaacaaagtttcaatatactctgcgttcaattccttggcctttacatggaaagagagtgaatctacacctttattcaagatatccaacgccttggcattggcctctttggggcattccactttgatttcctgacgcacaagccattcattgttatctttcttggtacctctgagataagggaactcgccgggaagagcatctgtcgtcttcaaaccttccaggtcctccatacggtagaaaggtttcactttaaatccttcgtttgtcttccaaacgagtttcttctcgaaatccgcccctttcaggtctgcggtaactttctccatccactgctcagtggaaacgggagagaagtcggagaagagtttttctttactgtctgccatagtttatttaaaattaaaatagatgaatactattcatttttgtcatcaagagacttgcaaatataaggaaatacttagaacaaaatctttttttagagaaaattgcacttacagatgactccgcatccatacggattcagcgtattcaccggaaacacaccctatttttgcaaagttgatatagcaaaaagtaccacaaagcttttgtcacctcctttttattaagtaattttgcgcgaaattttaaaaaacgacatattaaaaggtactatgaattggttagaaagcttgttatgggacccttcatctgtcgctcacatcgtttgtttgtatgcattcgtaatatctgtgggcgtattgctgggtaagattaagattttcggggtatcgttgggggttacattcgtcctctttgcgggtatcctgatggggcattttggcttcacgggcgaaacacacattttgcatttcatccgcgaattcggtttgattttatttgtattctgtatcggtctgcaagtcgggccttccttcttctcttcctttaagaaaggggggatgcggctgaacatgcttgctgtcggtatcgtgttgctgaatatcgcagtagcattgagcatctacttcattgacggagggatagacttgccaatgatagtaggtattctctatggtgccgtaaccaatactccgggtctgggtgccgcacaagaagccctgaaccaaataaactatacgggagaccccatcgcattgggatatgcctgtgcctatccgcttggtgtggtaggtatcataggttccatcatagccatccgttatatctgccgggtgaacctcaagaaagaggaacaggaactcaatacgcaggaagcagatgtaaagcatcagccgcacatgcttcacctcgaagtacgcaacgaatcaatttccggaaagaccctgctccagataaaggatttcctgggacgtccgtttgtctgttcacgcatacgccatgaggggcacgtcagtatccccaaccatgaaacggtattccacgtaggagaccagctcttcatcgtatgctccgaagaagatgccgaagcggtagctgcctttatcggaaaagaaatacatgtagactgggaaaagcaggacaccccaatggtttcccgtcgtatcctcgtcactaagtccgaaatcaacggtaagaagctgggaagcctccacttccgcagtatgtacggtgtaaatgtaacccgtatcaaccgctcaggtatggacttgtttgctgatcccaatctggtacttcaagtaggtgaccgcgtaatggtggttggccagcaagatgccgtagagcgtgtagccggtgtattgggcaaccagttgaaacgtttggacactccgaatatcgttactattttcgtgggaatcttcctaggaatcctgctgggaagcctccccatcgcattcccgggtatgccgacaccggttaagttaggtctcgcaggtggtccgctggtagtggcaatccttatcggacgttttggtcacaaaatgcatcttgtgacgtacaccaccatgagcgctaacttgatgttgcgtgaaatcggtattgtactcttccttgccagtgtaggtatagaagccggtgagcattttgtacaaacagtagtagaaggcagcggattactgtatgtaggctatggattcctgataaccgtcatccctttgttgataatcggcatgatagcccgtttctattgcaaagtgaactacttcaccctgatgggtttaatagcaggtagcaacacagaccctcctgcattggcatacgccaatcagacatcaggcaatgatgctccggcagtaggttactccacggtatatccattgacaatgttcctgcgaattctggcgggacagatgatactgctgacaatgatgtaggaggaaattaaggaattaaaattaaaggctgcgcaatgttggtttaacccaactacgcagcctttaattttaattccttaaagtcttagcttcttcttgacgaactcttctataaagtccaccgtagcctcaatacctaatacggaagaatcgatacacaagtggtatgtttcggcagctccccattttttgtagctgtagtagttatagtattcggcacgcttcttgtccgctttgttcatcatctcctccgcttcacgctcagaaatggaatacattcggcaaatacgcttgatgcgctcctcattggagcaggaaatgaagacattggcacagcgtggatgttctcgcagaatgtaatcggcacaacgccccacaaacaagcaggacttctcctccgccaatctgcgtatcacgtcactctgcactttgaacagagcatcattactcaggcaattcgtggccggaatagccccgtcactgacaaaagggaaacgcatgccgaagagccctccaataataccttgtgaagctttctcatcagctttctcaaagaactcacaacacagtccactctcttcagaagccaacctaatcagttccttatcataaaagtcaatacccagacgggcagccagtttctcgcctatctcccgtccgccactgcccagttgacggcctatattgattataaaattattgcccatacgcttattcatctattggtttgcagatagcaaatataaatattcttacggaatatctgcagaaagtaggaagaaaaattcagagcctctcccccgacctatccctacaagggagaggttctgaatttgcggaattgacaaaccaacatcaccaatgctatcaaacttgcaagcaaatcggataccggcatgctgtaccacactcctgccactccgaagaactgcggcaggataagcaggcaaggaagcagaatcagcatctgtcgggtaagggaaaggaatatcgctttgcctgccatgcctatgctctggaaaaagttggaagtcaccatctggaaaccgataatcgggaagaacattaccgtaatgcgcagtcccgtgaccgaaagctctgtcagttccgcatccgatgtaaagatgcccactaccaggtccggcaccagcataccgaccagaaagccgaaagtggtcactgccgtggcatagattatcgtcagtttcagcaccttgttcacccgtccgtacagcttcgccccgaagttatatccggcaataggctgcataccctgattcagccccatcacaatcatcactacaatgaaaaccagacgattcacgataccgaaagccccgatagccaagtcgccgccatacttcttcaacccctgattgataatgataacgatgaagcaggctgccaggttcatcaggaaaggagacatgccgatggcgagcgaatcgaatacaatcttacgtttcagacggaatatcccccggtggaaatgcaacagctcatccttattgccgaaaagcttgaactgccacgtcaaagagatgatttgcgccacaatggtagcgacggcagcaccacgtatgccccagccaaaaccatagataaacaccgggtcgagtatggtattgataaccaccgtggctatagtggcgtacatcgccttctgtggatgccctgaagagcgcagcactgcattcagccccagatagaggtgcgtaacggcatttcccaaaaggataatctgcatataatccctcgcgtagcccaccgtctggtcactgcctccgaagaaatagagaatcgggtcgagaaagagcatgacaatgatggtaaaggcaattcccagtaccatgttcagcacaaaaacattgcccagcacacactgtgccgtgtcataatccttctgccccagcttgacggaaatcagtgtagaagcccccactcctaccaacgaaccgaacgccgcagccagattcatcaacgggaaagtcaacgccaatcccgaaatagccatcgtcccaacgccgtgaccgatgaagatactgtctaccatattatataaagaggatgccgtcattgcgatgattgccggaacggcatattgcatcaagagtttacctatactttccgttcccaacgccgtgggagtcttttgtcctgccatattatatacctatttctttttagcgggtgcaaaggtactcttttttttaaaacagaacagcagaaaaaacatcttaaacctgcacactatgcggatgatttatgctatctttgcgattcaatgataaatcataagatatgattaccataatcataccgtatgattgatataatcataccgtatgattggcacattcataccgtatgaaccatgcctgacctaccggttgagccggacacataataacaacaagcccccatggcattctataagaaagtaaaacagaaaggcgacgacaaatggcacccaagagccgtcaccaaaggacatccctatacaacggatgaaatagcccgattattgtcggaaatgtctacggtaaccccgggagatacctatgcagtattaatgaaccttggtgaagtgctgggcaagctgatgagctcgggacactccgtaaagctcaagggcatcgggacgttctactacacctgccgttcggaaggcaccggggtagacaccccagaagaagtgagtccggcgcaaatcactgcggtgcagatacgcttcatccccgaatactaccgcgggcaatgcggacaagtgacggaacgcaccctcctctccccgcacatcgaatgggtggatgccgaaggagagggttaatgtcacccccgttccctatatttcaaggaaaaaggttctctatctgaaaaatgtttcgtacttttgtacccaaattgagtgaaatatagcgaaatgaacgtattagaactaagtgaacaagaaatcattcgtcgcaacagtatgaatgaacttcgcgcgatgggcatcgagccttatcccgcagcagagtatgtaacaaatgctttctctaccgatattaaagctgaattcaacgacgatgcagagcctcgccaggtgtccgttgccggacgtatcatgagccgccgtatcatgggtaaagcatctttcatcgaattgcaggactccaaaggacgcatccaggtatatatcacccgcgatgacatctgcccggacgaggacaaggagatgtacaacaccgtgttcaaacgtttgctcgatttaggcgacttcatcggcatcgaaggattcgtattccgtactcagatgggcgaaatcagcatccatgccaagaagctgaccgtacttgcaaagagcatcaagcccctgcctatcgtgaaatataaggacggcgtggcttacgactctttcgaagaccccgaactccgctaccgccagcgttatgtagaccttatcgtgaacgacggcgtgaaagaaaaattcctgaagcgcgccaccgtcatcaagaccatgcgtgccgtgctggatgaagccggctacacggaagtggagacgccgattcttcaatccatccccggtggagcaagcgcccgtccgttcatcacccaccataactctctggatatggacctctacctgcgtatcgccaccgagctttacttgaagcgactgattgtgggcggatttgaaggtgtatatgaaataggcaagaacttccgtaacgagggtatggacaagaaccataacccggaattcacttgtatggagctgtacgtgcagtacaaggactacaactggatgatgagctttacggagaaattgctggaacgcatctgtatcgccgtaaatggctgcacagaaaccgaaatagacggcaaggccatcagtttcaaagctccctaccgccgtctgcccatcctggaagccatcaaggaaaagaccggatacgacctggagggcaagagcgaggacgaaatccgccaggtgtgcaaggaactgaatatggagattgacgacaccatgggcaagggtaagctgattgatgaaatcttcggagaattctgcgaaggaactttcatacagcccactttcatcaccgactatcccgtagagatgagcccgctgaccaagatgcaccgcagcaagccgggactgaccgaacgcttcgaactgatggtgaacggcaaggaacttgccaacgcttacagcgagctgaacgacccgatagaccaggaagaacgcttcaaagaccagcttcgcttgagcgaaaagggagacgacgaagcgatgttcatcgaccaggacttcctgaaagcattgcaatatggtatgcctcccacatcgggcatcggtattggtatcgatcgtctgacaatgttgatgacgggcgaatccttcatccaggaagtgcttttcttcccgcagatgcgtccggaaaaggttgtccccaaagatgctcctgcacgatacacggaactgggcatccccgaagattgggtggctgtaatccagaaggccggctacaacctggtgagtgacatgaaagatgtgaatccgcaaaaactccacatggacatttgcggtatcaacaagaaatataaattggaactggcaaacccgaccgtaaacgaagttgctgactgggtcggaagaattaagaattaaaaattaaagaattaaataggcaaaattaaagataggaggaaggtgaaggcgcgctccttcacccccttttaatttttagtttttaattattaatttcgatatgaaactacccggtaagatagccatcatgggcggaggaagttgggcaactgccattgccaaaatggtactggcccaagcggagtcgataaactggtatatgcggcgagacgaccgtattgccgacttcaaacggcttggccataaccctgcctacctgacgggcgtcaagtttgataccaagcgtatcaacttcaactccaacatcaatgatgtcgtgaaagaatctgatacgctcatcttcgttacaccttccccttatctgaaggttcacttgaagaaactgaagactaagattaaggataaattcatcataactgccatcaaaggtattgtacccgatgacaacttgattgtctcggaatatttcactaaggaatatggcgtcccggctgagaatattgctgtattggcaggtccctgccatgcggaagaagtggctctggaacgcctttcttacttgaccattgcttgtcccgacaccgacaaggcttgcaccattgcccgcaaactggccagttcattcatcaagacctctgtcagtaatgacgttgccggcattgaatacagttcggtgctgaaaaatgtatatgccattgcagccggtatttgcagcggtctgaaatatggcgacaactttcaggctgtgcttatgtccaatgccatacaggaaatgaacagattcctgcaaacggtacatccactgaacagaaacgtaaatgattccgtttatttaggtgacctgctggtgacgggatattccaatttcagccgtaaccgcacattcggcacgatgattggcaagggatactccgtgaaaagcgcgcagattgagatggaaatgattgctgaaggatattacggtacaaaatgtatcaaggaaatcaacaagcattatcatgtcaacatccctattgtagatgcagtatacaacattctgtatgagcgtatctcgccgacgattgaaatcaagctgcttaccgattcattccggtaagcgcgaaaaaagataaaacgaaatactgaatttaaaacctagaatattatgattagtttgaacattgaaaagactcttggattcatctccaaagaaaacgttttcgcctatgaagcccaagtaaaggctgcacaggaagcattagagaatggtaccggtaagggcaacgacttcttaggctggctgcacctcccctcttccatcactaaagagcacctggctgacctaaaggctaccgcacagacgttgcgtgacaactgcgaagtagtagtagttgccggtattggcggaagttatctcggtgcacgtgcggtgatagaggctttgtcaaacagcttcacctggttgcaagacaagaaaacggctccggtcattctgtatgcaggacacaatatcggtgaagattatctatatgagcttaccgaatacttgaaagacaagaaattcggtgttatcaacatctccaaatccggtactactactgaaacagccctggcgttccgtctgctgaaaaagcaatgcgaagaccaacgcggcaaggatatggcaaagaaggttatcgttgccatcaccgatgccaagaaaggcgctgcccgcgtaacggccgacaaggaaggatacaagtcctttatcatccccgataacgtaggcggacgtttctctgtattgactccggtaggcttgctgcccatcgcaatagcaggtttcgacattgagaaactggttgcaggtgcagttgccatggaaaaggcttgtggaaaagatgttccgtttgcagaaaatcccgctgccatctatgcagctacacgtaacgagctctacaagaacggcaagaagattgaaatcctcgtaaactacaatcccaaactgcactacgtaagcgaatggtggaaacagctttatggtgaatccgaaggtaaggaaaacaagggtatcttccctgctgccgtagatttctccaccgacctgcactccatgggacaatggattcaggaaggcgaacgtaccatctacgaaactgtcatctccgtggaaaagacacagcactccctgcaggtaccttcggacgaagcgaatctcgacggactgaacttcctggcaggcaagcacgtggacgaagtgaacaagatggccgaattgggaacacagcttgcccacgttgacggcggcgtacccaacatgcgcatcgttatccctgcactgaatgaagaaagcatcggaggtctgctctacttctttgaaatagcttgcggcatcagcggttacattctgggagtcaatccattcaaccaaccgggtgtggaagcatacaagaagaatatgtttgcactgctgaacaagccgggctacgaagaagagtccaaagccatccaggcaagactttgataaatcaggaattgagagttgagaattgagaaatgactgtgcaataagcgcaatgaaaagccgtttcccgattttcaactctcaatttatttaccctgcatttcttaatttttaatcctcaatctaccaagtgttcgaaaactctatcgcccgttatctggaaaagcacgggcattccaacatccaattgaaagcagttctttttgacatggacggcgtactgttcaactccatgccctaccatgccgatgcctggcataaagtaatgaaacgccatggcctgcacttgagccgtgaagaggcatacatgcacgagggacgtaccggagcctccaccatcaatatcgtttatcaacgccagtatggcaaggatgccactcccgagatgatagaaagcatctatgcagagaaaagtgccgaattcagtacccacccggaaccggaacgtatgccgggtgcttgggaagtactgcaaaaggtaaaagcggcaggacttactccggtacttgtcaccggttcgggccaacactccctgctgaaccgccttgcccataacttccccggtatgtttcagcgcgaccacatggtgaccgcctttgatgtgaaatacgggaagccccatcctgagccttatttgatgggactggaaaaagccggagtacaagccaatgaagctatagttgtagaaaatgcacctatcggagtacaagccggaacagcagcaggcatattcactgtagcagtcaatacaggtccactggacaagcaggtattactggatgccggagctgatttattgtttccttccatgcaggcgctttgtgaggactgggaaaggttgcaaaccgcattagatgccagtaatagccttcgccacaaagattgacggcgacccaaacaataacagttgattcgagtttatataacaaagtactactgcatactttatcggtatacagtagtactttactgatttttatagtttaatcaatatctaacattctgccgtatcgctctaaatgtcattacttgatgtacagaaggcatctattgtctttcttcttaaaacgctccaatctactcattttctccttctcggtttctttaatagggaacgttatcctacgagtatctttatcataatcgtacaattctctggcaggaactacataaacagattccggaccgtcaccacaccatccaaagccaaaaacataaaacaagttttttatcggacggttcaacagattagagttcatatacctttcatacttttcaatgtcttttatatcgagataaaaacctatcttacttcgccatttacattctacagctataatatctccaacttcatgaatggtactcgtagtggtaacacactccatcaacaaatccggagatgatgaagacagaggtctataaccctcaacgtatttatcacctctccaatctaaaagccgccaaaatattttcttgtcacaaaggtccggataaccctctttactaatattagagttcttcacaacccattcctcaaatctatctcccaaatatttacttttcttcctttctttaaaatattgaaaggtatccataaaccgatattggaaaacacctacaaaatcatcgataaactgatttaatattttcatagccataatagtctattgtgtctttaaataatattcattgcaaacaaaaattcataggtgaagagccacaacacccattttcaaaatagatttttttttcatttccaaaaatagagttttttcccaattctttccagatttccttctcatctttgcaatacaaaaaacaaataaagtattaattattaaaaaatagagaagtatgaaaaagttagttatgatgttggtttgtatgtttgcagtgcatacaatggtaatggcggataatgataagccgatagaggtgagccagttgcccgcgaaggcgcagacatttatcaagacttactttaaagaccataaggtggcaatggctaaattagagtcgggaatgttttataaaagctatgatgtggtgttcacgaatggggagaaggtagaatttgataaatcgggagaatggaaggaggtacgatgcagacaaagtgaagttcctgcacagattgtaccggaagcgatacgtaactatgtaaagaccaattatccggatgcaagaattcttcagattgagtacgatgacaatgagtatgagataaagttgtctaatcgttgggaaattacatttgactctaaaatgagggtgattgacattgacgattgatgacaagaaagatttttataaagtatcaagaagctgaaaagagttgcttggagagggtttctccaggcaactgtttttttatgcacttccgtacggtagcagggcatatggtgctgcgctcattgtacaacagtggttgtactactattccaattgcccggagtcaacgaagccccggctgcacttttgcagttttttaatcagtgtgtccggagaaggacactcaaccttctccggagctgaaaatactgatttataaggaaacggcgcttctcggcgctttctgccggaaggcaactcaggctatgacgctttcaggattttggcagacctcaccatggtataggtagtccccttagtacaatggccatatcattcagcttactgaaaaatagagtttttttcagagaggtttgttcggcagagaaattccaaccacagaacggaagaacaacgttttcagtccgtcataaaatcctggaagagcaaccgttccatgcgtctcttccgggaatttttttaataccacccgcaaatgccgcttctccatacgaggaactgcactccctataaaatcatctgtcaggggaaagtggatcagcttcctatcaggacgcggctgagtggcaaacgcaacatacagttgctttcctgaaaagtcaaccttatctacctgccgttctacctgtttctgaaaatatcctttatcccaccataaactggggtctatggcgatgtatgtatcaaatgcaccgggataattcagcaaaacatgcagcgtgaacaacccggcataagaatgtccggccaacaagtgttgtccattcaccggcaagtcttgttctactgcggggcgtagctcctccgtcagaaaacggcaaaattgtcctgccccacccccttccggtttatcgcccgaacggacagttccgtcacgccgggcagcggaacaggttggcgtaaagtctctggtcctgtctgtattcaggacagccacaacgatacagggcggtaaggaagaaactttggaggtggaaaacaagcgagtaaaacctaccaccgaatgaaaaaaagaatcaccgtccagcaaataaagaaccggataactttcctctttttcaccagggcggattgcaggtacatacacccaatactccctaacctcattcaagacatgcgaaaacaaagtgtggcgagtcccgatagaaatagcttcttgcgctctcagcggaaaaccgagccaagtgacaactaccaatatgaacagaatatgcaggcttctcatttcaattcttttttcagtctgcaaagttcgcagaaaataagttgactacctatccctatttttaggtattctcacggttgaaagctttccgcagaaatcaaaggctgattaagaaggtttgatgggcaactgaatttccgtcatccattcatccaccgtttctttgttccaaatgccgtcaatatggcaaaaccggggacggtcaataacctcgtatccatttgcctcggcatacgcaaaaagctcggcgaaagtttcgggcatatgctcataagcaccgtaatggttgacacagagcgcaaccggtacttccggaagttccttgaatttaatcagctccgaatcttccttgcgttcagccaccgcttcaaaaaactcgatatcaatatcaaccccatattcctcattatattccaccgtgaaacaatattccggggcaggacattcacaacccaaacggtacatttcaggcccgatgatattcggacaaagattgaacagctcctgataagagtctattttacggcgatgggtagcaaaaattcttgaagggagggatttcttaaacactttttccataacattctcttgtttatggagtaaattttccaatttggcaagttcggtctgccgccatatcaagtgttcaatctcgtttttgcaacgttctattttaaccttcaacaattcagcatccggaaattccttgccatcggcaaacaactcggatatctcttcgaggctgaaccctaattgcttgaggtaaacaatacggctcatacaccggagctggctgatgtcgtaatagcgataccccgtccactcatccacttcaacgggtatcatcaatcctatctcttcataatgacgaagcgtcttaacggtcacttggcaaagtttggaaaactctccgattttaaacttcattttattcttcataaactcatgcgcattttgtttatgatgcaaagataggtcctgcccttaggtacgagtcaagagattgcttcaaaaaaaaacacatatttcactattcgcaacggcaataggtatttgcaccgcacgtacaacgaggcaacagctgctcgctcagttcattacggtaaaattcatacagctgccggtacatgatttcatagagtgcggcaacttgttgctcctgctcactttcattttgaaaacgatttttaaagggatcttcaaaatcaaaatgcgcctgctgcttggcatccagagtgataaatttcagttcttctccggcttctttacacagggtaatcacgtagtcccatgaccgatgcgtataggccccgacaccagagggtttcttgcgagacacgctgaaaccattctgttccatcacattgcacacggcatcgggaacgcagttcccctccataatacctgccgtagagatattcattcccctgccaaatgcatgcaggagttcctgcgcgatacggctgcggcacgtatcttcattacttattaacagtatatccattgtccgttacttttccagatttaaatactcgccatctccttctttcttcatcttcgctttacgcgccaagtcgaacaaggcggggttaatgtggcaatatccacccggatttttgtccagatagtcttgatgataatcttcggcaggatagaagttcttcaaaggctctatctctaccaccaacggacgggagtagttggcagccagccggtcaacagtttcacgaataacgggcaggtcggcggtatccgtataatagatacccgtgcgatattgtatacctctatcaccttcttgcttattgaggctggtagggtcaatcgttttgaaataaaggtcgataaggaaaggcaagtccaccttatcggcgtcatactgtacttttacggtttcggcaaagtccgtggtgccggtacatacctgccgataggtaggattggctatatttccattggcatatcccacctgggtagcctccacaccttctatttgtttcaggaaatgttcggtaccccaaaaacatcctcctgccagataaatctctttcattggtttcatgtctgttctcctttctgaccgtccttccggcttaccggcataggacagaccaatcattaacattgcaaaaataaatattatttgtttcatacctctgcctctatggaaattataacaagaaagagaaccgtatggttgacttttctggatgtattgtataaaaaaggactccctttgcaaagtattcatgcaaagggagttcctttctttgtgaccccggtgcgattcaaacgcacgaccttcagaaccggaatctgacgctctattcactaagctacggagccaaatgtggatgcaaaagtataaaaaaattagcagattcctaacattcaaacgctttttatatcaaaccgaggaatatttttattattactttgagaagaacaaccgcaattacacaaacattttgctattttttttcacaaaatagaagcaagtattaatattattcctatctttgccgaacaatttaatagaagttatactgaatagatttatgagctacctgataacacctgaaggttacaaacctttattggacctaaaacagactgaattagggattaaacaaattaaagagtttttccaattaaacctctcttccgaactgcgcctgcgacgtgtgacagctccactgttcgtattgaaaggaatgggtatcaatgacgacctcaatggagtggaacgtgccgtgactttccctatcaaagatttgggtgacgccaaagctgaagtggtacactccctcgccaaatggaaacgcctcacgcttgccgaatatcatatcgaaccaggatatggcatctacacagacatgaatgccatccgtgccgatgaagagctgggtaatctgcattccctttatgtagaccagtgggactgggaacgcgtcattactgccgaagaccgcaatgtggaattcctcaaggagatagtaacccgtatctatgcagccatggtgcgcacagaatatatggtatatgagatgtatccgcaaatcaagccttgcctgccccagaaacttcactttattcatgccgaagaattgcgccaactatatccggacttggaacccaaatgccgcgaacatgccatttgcaagaaatacggtgcggtgttcatcatcggtatcggatgcaagctgagcgacggaaagaaacatgacggacgtgctccggactatgatgactataccagcaaaggactgaacgacctccccggactgaacggtgacctcttgctatgggaccacatcctgcaacgcagcatcgaactttcctccatgggtatccgtgtagacaaggaagccctgcttcaccagctcaaagaggaaggcgaagaggaacgtctggaactttacttccacaaacgcttgatgaatgatacactgccgctttccatcggcggcggtataggacagtcccgtctctgtatgttctatctgcgcaaggcgcatatcggtgagatacaagccagtatctggccagaagatatgcgcaaagagtgtaaggaacacaatatacacctgatttgatatacgtttatcccgtcatataatataaagttcaaccctcaaaaggttggactttattttttattttgtactttagcatccgaaactactaacagatccaattatgaatgttcaaatagaagaaagctggaaagcacatctgcaacctgaatttgagaaagattatttccgtacattgactgattttgtacgggacgaatatgggaaatatgccatatatcctccgggaaagctgatattcaatgcattcaacctatgcccttttgacaaagtaaaagtcgtgataatcggtcaagacccctatcatggtccgggacaagcacacggactttgcttctccgtaaatgatggtgttcccttccctccttccctacttaatattttcaaggaaataaaaaatgacattggcactgatgcccccactaccggaaatctgacacgctgggcagagcaaggcatattgctgctcaatgctaccctcaccgtacgtgcacaccaagccggttctcaccaaaaccgcggttgggaaacatttacagatgcggccatccgcattctcgccgaagaaaaagagcatcttgtatttattctttggggagcctatgcccaacgcaaaggggcattcatcgaccgtaaccgacatttagtacttacctcggcacatccatctcccctatccgcctataacggcttcttcgggaacaagcatttcagcaaaacgaatgattacctgagagagcacggggaaaaggaaatcgtttggtaaacatcaataccactgaatattactctgagtctggcttctctgttcccatttcaagtcctgcaggatacttgcattggcacgaatggtaaagttatagtatttccatcgtccgaaaggtgatatggcagccgtcatgctgaaacagtgtaggtcacgtgtgatgttaaaagcggtctgcgttatctccttcgcattgaagtcataaccggaattgaagctgacagcccatttattggtaagcttgacgttaccgtttatattaagggaattcaggctgaatttgtacggatagcgcatgttcttacgattaatgggcttactggtgtcttccgtaatattgaaaccggtactgaagttgatggaccaaggcatcttgaatacctgataaccgtcagcgtcggcagcagccttttcagtcttcttcttcggagtaccaccctcggtggcttccccctccatatcaccgtcttcctccgtcgaagcattctgatcctggtcctgctcctcatcatccttctgaccggtgaagaagttccttatcttcttccacgaatcattgttcacagtccaactgaaggatgtaccatatccagaccaacggccaaaacgaccataagaccattctgtacggttaccgggcaccacccttccgttctcgtcaaactcgtaggcataagtggcaaaggtagagttcatactcaaagtataactcttactcaacttcagacgaagattaaaggtcaagtcactccaaggacgcacctgggcagctgtgttgtaactgatacccatagtcaaatcgtcaatcaggctcaccttgcggatagagtcattcttatccttgaacttcatttcaaggttgttagagatattgaaactgataagtccctgctttcccccacttggcggagtgaatacctgaccggcataataagaatactgcacagtatcacggacaccattctgatcctttatataagaatcgtaatagccataacgggatgaagtaaaatcgggcgcagcgctgaaactgatagagggggtgatgacatgacggatctgtatctccttcttcttcatgaacagcggcttgtacatgccataaagtttagtgttgatacccaaactggcactgtagtcatacacacggtgaaaaccgtaagtcgtatcgtttacctccttgccttgctcatcatcccagtccttcttcaccttgcgggtgtaccaacgctctgtataattcacagaaggtgtaacattgaagtatttgaataaagtaaacgtggcacttacaggaatctcatgctgcataccgttctcccaatcgcgtatcaagttctttttgaacaacagattgtctttcgtcttgatgctgttcttcagacgaccggtataacgtactgaaatcttctcataccacctttcatctccaacagcatgtttacgtttaaaagggaaaatagtactcaaggaaatggtcatgtcaggcaaagtcacagcaatagaagagtctttcatactttgtgcaatattacttgacatggaaatattcaaatgctgatcaggaaagttgcgcgaatagctgacactggaagtcttggtattctgagacatagcctgcgaattgtacatattgtcaatattggtacgctcataactactagtagcaaagttcacactggcagaaaaagtagaattaggatttgctttaggatcctgccgatgagaccacaccactttgaagtctttggcaactgagtagtcgggcaagcctttgtcaccggtcttagtcacctgatagctcgcctgaagcaaaccggaatatttataacgcttcacatagttcgactccatattaagcgcccaagagcctttcgtaaagatatccgccctcagcttcaaatccatttgatcactgatggcaaaatagtatccaccgtcagtaagaccaaaaccacgattagagtcatccatataggtaggcatcagaaaaccagactggtaactgcttgagaacggaaaaaagaaaaacggaacggcaagagggagcggtacatcctctacaaccagataggcaggtcccgtcactacattctttttcggacgcactttggcataggtcatctgcatataaaagtgaggatgatcatgatgatcacaagtcgtgtaacgcccacttttcatataaagctcatcattatttcctttttttgcattgttaccagtcacatacccttcaccctgctggctaacaacattactgataagccctcttttactcttgaagttataacggatagtgtcagtttcgtaagaggtgtctccatctttaaaaaccggacgtcctttagctgtccctacagaatcgactacaccacgagcaaaaaccgtgctattatccatatccatagaaataatctcagcttccaaatcagctcctggataactcactttcccttgaccgtaaagatgagcaaaaccactctgtgtaaacacaatggagtcattggcttcataagcgacgggagcatccagcgcatccttcttgggaggagggggagctatcgtatcttgtcgcaacgagtcattgggcaatcccgccccatgttgtaaagtgtctcccacctgcaaggtgtcgccacgttgcaatgaatccgtccgttgggtatccggaggtacaaccttccctctacgatgctgagaagcagctccaccagagagaagaagcaagacgaatagtagtatgaatgatatgaatgtatttgctttcaatggcgtcattaactaatagtttacgcttggaggggcaaaagtacataatttatacggataatctccctttttaaagaaatttagattgctacaagaactgttcgcaccaattatcaaagcgccgtaccccttcttcaccataacgttccaaacttttacgagctttttctacacttttctccttttccaaatgagtttttgaataaaacttatcggcaaaacagataacttgttcttccaagctgaccggaaccatttcacgatgaggcacaggcaaatcctgcgcaatgatttccttcaatgaaagtccggcacccgtatggcgttcacaaaccaaagcatggcggggatatccttcgccacgcatcaagtcggctcccaaataaccgtgacagatataaggcttgtcaccaaaacaatggatacctgccgcatctgtaagaaaaatgcctatatcgtgcagcatggcagcctcgtacagaaaatccttatccaatgaaagttccggatggcggtcggcaatccataacgacttgtcggctacggaacggctgtgcgtcaacagtatatgccgcaactcattctcttccggataatatttgttaatgatatctatcggattcattttaagttatgagttatgagttataagttatgggttatgaattgtcaatcaccctgaatttatacatacagatttcattacgcatatcacaactgcgtctgtctgtacggaatatcttttccagatgatacgtctgttccagctctcccaacatattctcctcctcctttacgggaaccaacaaatagccctccccgctggacggacgttccttttcaatgtgccgcatgcggtctttcagatagaagttaacaccatagaaactcattttcgagtaagaatagaccacaccttccggaacatacgtattgaccctttcagccaaatgtttatctgatttcacagccagcaccgtgggctgataaaccgaatccaatgatacgaaaaggcagagcatacatcctgctatgccatataataatgaccggctatccgcacgctttatcaccatgcgtaatgtgcagacagcggctactacgggaagcgctaccaggagccacttgggaacagacaaagccacatcctccaacgcatgcataaaggctacattctcagcggcatggcgtccgcttccaaaaacgctgtcgggaaccaggccgagacgaactacgacaaaaacaagcgtaagcaacaagcccaaagaagcaaagatgattgcacaaatcctgaaaactcgtgcccccttttgtaccaaagccaacagatactcagctatcagcactgccataaacggatagatgggaagcagataaacgctccgcttactcttggggatgcagtagaagacaaagattatcagaatgaccagccacgtgaacaattgtaccggagactggttgcggaaagcagtccagcccttcttcaaccgcaacagcagggtctccccttccggcagacaacgcatgtttttccacttcaagccaaacaaggaaattaccagaaccaacgtccagggaatccatccccaaatcaaagtcaggaaattataccatataggattttcatgggactcgtaggacattttgcccataaaccgcccggtattctcctccagaaccaaatcgaggaacggttgtccaccttgtctgtaagctacgtatacccaagctaaataaggaacaaaagaaagcaagccgatacctaccaacgagaaaaacgctttccagaaagaacgtccgcgcaacaactgatacacaccgatacacgcgcaagggaatatggagcctaccggccctttggtcaacgtggcacatcccatcagcaacaccgcaagccagggcactccgcggcatcccttctcatcccagcggaacagcagacaaagggaaataacgataaaggcaacctgaaccatatcgacccgacaagcgacagccgcccgatgcacctcgaaagaagacaaaagaagaatagaggccagaaacgccgtttgaacgtttttacgttttgccacaaaggcaaagaacatcaactgcatggctaaaaaagccaatgcagacgggaaacgggcggaaaactccgtcacctctccaaaaagggaagagacggcggctattgaccagtagaagaaagggggtttataagcaatatcagtaccatagttcaccggaagtatccagtttccactttccagcatagaaagggcaacaatcgcctcccgcggttcccccttggaataaaaaatggtttctcccagaaagggaacaaccacaagcacactcagcagcgcaataaaccagaacgccttctttctgtccgacataccttatttgttttttatgttttctggacgcaaagatagcgcaaaccgaaagcagatgcaaatttatttgcaatttgctgagatgcagcttaatttcgcaaagcaaaattacaaataattctgaaacaatgcctaactttgccgccccaatgataatggcaacagagagtagatatttaatgttaagatgaagcggctgaaacaactaccggaatttgtacgcttcgtaatggtgggcatctttgcgacagctctgcactacggattgtattttgtattacaacgggttatcaatgtaaacatagcctatacactgggatatgctctcagcttcatcgccaatttctatctgactgcttactttaccttcggccggaagccctcatggagaaaagccttcggatttggaggggcacacttatgcagctatctgctacacatggggttgctgaacctctctctctggatgggcatctccaaacctctggcccccattccggttttcgccatcgccattccggtcaacttcttactcgtacgtttcgttttcaaaagaaaagagtgataatttgtttttctcccgatttcttacgaatattgcaaaaagatttgttctatgatggaaaactctcccatactcgccgttgtcgtaccttgctacaaagaagaggcagtgctgcatgaaacccataaacgattgagccaattattcgaccggctgatacaagcccggcaaatttccccggaaagctatatattatatgtaaacgacggaagcaccgaccagacatgggctatcatcaaagaactgcaccaaaatacggcctatgcctgcggactgaacctggcaggaaacgtaggacaccagaatgccctgctagcaggactcaatgcagtaaaagagcgttgcgagatagccatctccattgatgcagacttgcaagatgacatccaggtgattccggacatgataaacagctataaagcgggcaatgacatcgtttatggcgtacgtaaagaacggaagaccgacactttcttcaaacgcaacaccgctttggtcttttatcggctgatgaaggcaatgggggtaaaatccgtctacaaccatgccgactaccgcctgatgagccagcgggctatacaacacctatgccgcttccgcgagcgcaacctttttcttcgggggctggttcccctcatcggctaccagacggacagcgtgtactacaatcgtgacaagcgttttgccggagaatcaaagtatcctttccggaagatgcttaattttgccatcgacggtatcacttccttttccgtcaaaccggtccgtatgattttttggataggctgcatctttattcttgtggcactgtgtgtcaccggatggacacttcactcttacacacagcataacgccgtccccggatggtcatcactgatgatttccgtctggctggtaggaggtgtgatacttgtgtcgctggggattgtaggcgaatacatcggcaaaatatacattgaggtgaaggaccgaccgcgctacaatgaagaagaactgctgatgccgtccggcaaaacagaataaaagaagcccatcatcattctacacaaaagttttaaaaaggaaaaacacttgtcacgctatcacactataataaaggtatagggaacagtgtgtgtctttcttgccgacaagttggcaagattttgccaccctattggcaagactttgccataggcatggcaaaagtttgccaaaagcatgacaatgggttggcaaaattactctctggcagacaatgagttaacataactatcaaaatcgtatcgtcacatcagtttatatcaaaaaacacaaaatcgcttgcgaaagcgacataaatgccgtatcttagtacacgtgcaagcaaaccattttgcttacacataataaaaatctgcttatgggaacattaggctgcatcaatgacatgctacaaagggataaagagaaccgtgctctccgcaagttgagcagaggacggatgcgggagcactacaaataccttgtagaaaggaaaggtcctgagagagccgatgtaaccattgaggaaatagaaaaaatccgaagaaatactactgaaaaggaattgtcagataaagaacatctattcagggcaaagacgattcttgcagcatgtgctttagtcttgcttttattgggagtactttgttataaattgttcttataagcaggtctgaaaccaattggcaagaaatctacccggttaaattcatcagccattggctggcgattgaaagcagattcccatgcttcataaaaattcgcatactttttatattcgaagcaaagaatcaacaacttgattttcctaaaccaataaattagaaatgaaaagattatctttgcaaacacaataaatacattgaaagactttctgttagaacatggaacatctaaaagcatacattttagcacttaaaaacatgaatacagattttacaattagaattgcccaacagcctgatgcccttgaacttatgagtttgtttcaagagacagtcctccatataaacaaacgtgactattcagaagcagaagtggcagattgggcatcgtgcggaaacgacctctcccgcataaaagacatgattaagacacattattttattgtggcaaccaatcaacagtcacagattgtcggcttttcatccattacccaccaaggatatttgcattctatgtttgttcataaagattttcaaggtaaaggcattgctaccatacttctaaatgagatagaacggtatgcaaccgcaagaggaatcatgcgaattacatcagaagtaagcctgacagcccgtccattctttgagaaaagaggctatatagtagaagtggaacagaaacgcaaagccaaccaactttatctcaccaatttttggatggcgaaaaggctggctgaatgaaatcgtataacggacgtattcctgcttgtggtgtcttttgtggtggttgtcccatatacacaagagaaaaaagtccctgcaaaggagcagaacagaatggttctcgctgtgaaaaatgtaaaacattccatttatgttgcttggaaaaaagaataacacattgtttccaatgttctgatttcccatgtactaaattcaaaagatttaccaaacgttggctaaaatacggacaaaacttcattgaaaaccaaaagcttttaaaaaacgtaggtgaagttaaatttttaaagtattataatgagagagtccacgaccagcttaccaacaatgacagaaaatcaggaataaaacaataattttgtacctttcgaaaaacatgtgttgtaaatgacagattttaattcatacatgggcaatatagacactgacttttttagggaactgtgtttaagaaacggagaactacggtattataaaagaaatgagtttatcctccgagagggagaagtcggttctttcttcgggtttattgtatccggtgtaatcaaatatacctgcatcaaccaaactgaaaacaaaacatataatgtaggtttttcttttgccaatgaatttatctctgattatcccaattgtttatacgacataaaatctgaattgaatatacaagcaataaccccatgtagaatctacatctgttcttccgaattacttctacaagaatttgaagagaacaaagaaaatcaacgaatagcccgcattgcagccgaacaattattttttcagtcgtattcacgttacttggatttgttcagatttacatcggaagaacgctatctccaacttcttaaaaaatgtccagaaatcctacaaatggtacccctaaaagaaattgcgtcttacttgaaaataacccctattcacatgagccgcatcagacacaaacagagttttgacagcaaagaataaacataggtttagaaattcaatcatttaacaatattccaagacaatattgattctgttaggaagttctcttttatctttgccctatcctttggctgattcagcgaaaggcaagaatgaaaggagttaaaacatagagtcctatatatgagaacaagaaaagtatttagaatgccacttgataaaattctttgtttatcagccaatgcaatattaaccattattgcactatggagtattgcatcagtctttttcgaaaacgtcacaattgattctataatagcccgtttcagcgtggcttctgcctgcatggccaacctattttcaaaacatcgtcttatccggataatattcctcattatggcatttgtactgataattgttgcaaccaccctctatgtccataaagcaaataagatgtaaaatactcagtagttattccgtctcatttttccttttcttccacagctgataactattgattatattctgccacagcacatacgatcccggaccgacggaagataacggattaagataagtatatgccatccagatggcaagcaccgtattcttttgccccagcgcctgccctccgctgatgcgttcaccataatggccgccgattctctttcctaaatagaattgtatacagcaggttatcagtcccgccagggctatcagcagttcaacaaataccggtgcatcactattgaccaatgaacgtaccgtctgccctgagacaatggcaagagctaccgcccacaaatagaaggctgcatcatggaaacccaacagaaaatgatgcatcttcggcacaaacgcacgcagaaaccatgccagcaagaaaggacaaagcagcaatggaaagactttactcagaattttcaggaatgcaacaaaaaaagtaatgtcagcatgaggctccaccaacgggaaaaccaaaggaacagccacagccgccagaagattggacaacaacgtataggtcgtcaggctggatgcgcttccacccagtttaccggtaatgacagccgcagcggttgcagtgggacaaatgagacagaccattgcaccttcaaacacttcccggtagacctcctccatagggcaacacaccaacaataccgcaacaatcaagcaagaaaccgtctggaacagcagtaaccatccatgccacgatttgggtttcagttcatgcacctccaccttgcagaaagtgagcagaagttgggaaaaaatcaaaagcggagtcaggaaagccactaacccattcacataaggtttggcaggcgccacaaaaggaatgtctgcaaaaaagaaatatcccaaagtaccggcaagcattgccaaaggcaacgtccagttctttataaaacgaaccagcatacttgatttgctattttaattatctgccgcaaagttacgcatattatcaatacattgagtcactaattactcaaacacagacattaattacactaaaaatgagaagaagaacaataaaactgaacataatccattagttttctataaatttccactacatttgccaagcgaaaaggaagcattgtctttgctacaattatatgaaactatacagacgatacatattatatataagtatatgcttagggctacttatctcccccttttgcagtggtagcgctgaagcgaaagactttgttgtcgttatagaccccggacacggcggacacgacccgggtgcagtgggaaaaatttccaaggaaaagaatatcaatctgaatgtcgcactcaaacttggcaaacaaatcaagaagaactgccccgatgtaaaagttatctatacgcgggaccgggacatattcatccccctggaccggcgtgctgaaattgccaataacgccaaagcggatttgttcatttccatacataccaatgccctggccaaaaaccggacggccaaaggagcctccacctggacactgggtctggcaaaatcggatgccaatctggaagtagccaagcgcgaaaatgccgttatcctctacgaaagcgactacaagacgcggtatgccggcttcaatcccaactcagcggagtcctacatcatcttcgaattcatgcaggacaaatacatgtcgcagagtgtgcacctcgcctccctcgtacaaaagcatttccgccaaacctgcaaacgtacagaccggggcgtgcatcaggcaggttttctggtattgaaggccagtgccatgccaagcatactcgtagaactcggattcatctccacaccggaagaggaacggtacctgaacactgaagcaggaactacctcacttgccaacggtatcttccgcgctttcctcacctataagcgcgagcaggaaatccgattgaacggaagcagcaataccattcttccggaggatgtacccgagcccgttcaagaagaaggcaacgcagctacagcgacaccggaaaaaaataatgcacctcaagcggagagtaaccaagctgcccaacgcccacaaagatcagaaaatgcagccgtttcccaaacagaacagagcggcatcgtgtttaagatacagatactcacttcttcacgtcctctggccaagaatgacaaaagactgaaaggagtgaaagacgtggattattataaagaaggcggaatctacaaatatacgtacggcgcatcacccgattacaacaaggtgctgcgcagcaaacgtagcattacggacaaattcaaggacgcattcatcattgcgttcaagaatggagaaaagataaacgtcaacacagccatcagcgaatttaaaaaaaacagaaataaataacaaaagatacatcatgaagtatattacaaaagaagttagaataggaatagcaggcatagctgcactttgcatattggtatacggcatcaactacctgaaagggataaatatgttcaagccctccagctatttctacgtaaaattccagaatgtcaatgggctgacaaaatccagcccggtctttgccgacggcttccgcgtgggtattgtccgcgacttgtactacgactatacccaaccgggcaaagtcgttgccgaaatagatgttgacccagagctgcgcattcccaaaggaagtacggcagaactggcagccgaaatgcttggtggcgtaaagatgaacctgctgcttgccaataacccacgggagaaataccagattggagacacaatccccggcgtactgaacaacggaatgatggaaaaagttgccaccatgatgccgcaagtagagaagatgctgcccaagctggattccatcctcgcatccttaaatgtcatactgaccgaccccgccatccctgcaaccttgcataacgtacaagatttaacagcaagtatggccgtcacaagccgccagttgcaaactctaatgaaggatgatattccacaactgaccggcaagctcaataccattggagacaactttgcactcatttccaacaacttaaaggagatagattatgctgccgccatgcaaaaggtagacgcaactttgaataatgtaaaaatgattacagacaaattgaaccagaaagacaataccatcggacttttgctaaacgatccttctctatataataatctgaatgccacaactgccaacgcagcaagtttattggaagacttaaaatcgcatccgaaacgatacgtccatttctccctattcggcaagaaagataagtaaaagattggcattatatagattttgtctaaataataagtccataaaggaattaaaaggaaagccctcatttgctctatacaaggagcgaaaaagggctttttcctgctctggacaaagaaggaaaacaagagacgtaaagctacataaatcactatatgacaaagtattagataaatgcaatacaccctatataaggaatatactcatagtagtcgataagtagctgaaagtaaagagcttattacttttcctaaaaacgcaagaaaaaaaggatttgtttttctcgaataagattgccaattttgcaatcgtagaagttatgcttaattaataaatgtatttatagccgttatgagtgaaatagatcatgtcgggctgtggaatcgctgtcttgaaatcatcagagacaatgttccggagcagacatacaaaacatggtttcttcccatcatacctttaaaatatgaagacaaaacgctggtcgtacaagtgcccagccagttcttctatgagtttttggaggacaaatttgttgatttgttgcgcaagactctctataaagtcattggtgagggaactaaattgatgtataacgtaatggtagacaagagttcgcggaaaaccgttgacctggagtctacacagcgtaccatcataccgcaaaaacaagtgatggacaaaaggatcccacagattcccgtccccgaacttgacccgcaccttaatccagaatacaactttgaaaccttcatcgaaggctacagcaacaagctgtcgcgcagcgttgcagaagctgtcgctcttaatccggctaaaacaatcttcaatccgctgttcctatacggagcatcaggtgtaggcaaaacccatcttgccaatgctatcggaaccaaaatcaaggaactatacccggagaaaagggtattgtatgtatctgcacacctattccaagtgcaatacaccgattccgtacgtaacaatacgactaacgacttcatcaacttctaccagaccattgatgttctaatcattgatgatattcaggaatttgccggcgtaaccaaaacacagaatacattcttccatatcttcaaccatctgcatcaaaacggcaagcagcttatccttacctccgaccgtgcaccggtattgctacaaggcatggaagagcgtctgatcacacgttttaaatggggaatggtagctgagctggagaaacctaccgtagagctccgcaagaacattctgcgcaacaaaatacaccgtgacggcctgcagttcccccaagaagtgattgactatattgcagaaaacgtgggcgacagtgtacgtgacctggagggcatcgtcatttccattatggcacattccaccatatacaataaagaaatagacctggaactgacgcaacgtatcgtacgcaaggtggtgaacagtgaaagcaaagcagtaactgtcgatgaaatcatcaacaccgtatgcaagcatttcggattggaaacagccaccatccacacaaaatccagaaagcgggaagtggtgcaagcacgacaaatagccatgtatttagccaaaaactatacagagttctctactgcaaaaattggtgcgctaattggacataaagaccatgccactgtattgcatgcatgcaaaaccatcaaagagctgaaagaggtagacaaatcattccgtgcggaaatcgacgagattcaagccgcactgaaaaaaggataagaataaaggattagggattaaggataaaggattaaatgcagctaagtatgcattagcttaaccccttatccctaatcttccctaatccttaattttcaaaatccctgctttttcattatcttccaaagattctccgacattgtctcactgtctttcttcgtataacgcacatctgtaaaaacctgcgccagcgtttccttattgttctccaagatgaactgcttgttctcaggaagcgattctttataggcatacaaccggtcaatgtcctgaggagtataatcatgataaaactcttcgtgtacaatggcctccagcggtaaacggtccacttgttccggctgttcggcaggccatcccactgtgactgtcgtgatgggaaacaccaattccggtaacttcaacgcttcgacaatcatctgagggttgtaagtggtagttcccagatagcaaatgcccaaccccttcttctcggcagccacgcaaaaagtctgtgccaccagcaaggtatcgacagcccccgtcacaaaccactcaaagttgttgtatcccggctcagccttacgttgctcacaccacttgctgaaacggcgcaaatctatgcagaaagtaagcactaccggcgccgtctgaaccatcggctgattgaaatgtgcaggcgccagtttggctttacgctctgcatcacgcgtcacaatcacactataaacctgcatgtttccgactgtagaagcccggaaagaggtttcaagcaaatcatttaacaaatcagcagaaatatccttctgctggtattttcggattgttctcctttgtttcaagctttccattctttctttttttgcaaagataatgtaatccacgaaaaattcattcaagagttcacacttttttcatcatcatatatccggaataaaatacatcttttcaacaagaaatgaacaattattatctttacgagcagataaaagtaaccttatgttcgactaaaccgagaacctttcagcccaacaagttgttaataaattccattttggaaaacttattcgtttactcaaagcattaaaacattataaaccaacaaattaataccaatcaacagaaaactatccaccggttaataaaaacattcattttaattttgccaaattgaaaaacattcatagctttgcaaatgcatttgttaacaataagtacaacttctacaattttacttatttgtaactaatcctaagagatacaacactgtggaaaagaaaaattattcttatgacgaagcctacggagaatctttaaaatacttccaaggcgacgagttggctgccagagtttgggtaaacaaatatgcagtcaaagattctttcggaaatatttacgaaaagtctccggaagacatgcattggcgaatagccaatgagatagcccgcattgaggccaaatatcccaatccattaagttcagaggaacttttcggcttgctcgaccacttcaagtacattgttccacaaggaagcccgatgaccggaattggaaacaactatcaggtagcttctctgtccaactgctttgttatcggtgtggacggtgaagcggattcttatggtgctatcttcaagatagacgaagaacaagtacagctgatgaaacgccgtggcggcgtgggacacgacttatcccatatccgtccgaaaggttcaccggtaaagaactcggcactgacctccaccggcttggttcccttcatggaacgctattcaaactctacgcgcgaagtagctcaagatggacgccgcggcgcactgatgctcagtgtatccatcaaacaccccgactcggaagccttcatcgatgccaagatgaccgaaggcaaagtgaccggagccaacgtctctgtaaaactgaccgacgacttcatgcaggccgccatcgaaggcaaaccatatacacagcaatatccgattgacgccacagagccggcattccaaaaagacattgacgcatccgcattatggaaaaagattgtgcacaatgcatggaaatcggcagaacccggtgtattgttctgggataccatattaaaggaatccgtgcccgactgctatgcagacctgggctaccgtaccgtatccaccaatccatgcggtgaaattccactgtgcccatacgactcctgccgtctgctcgccatcaacctttactcatacgtagtcaatccgttcaagccggacgcctattttgactttgagctattcaagaagcatgtagctttggcccaacgcatcatggacgacatcatcgaccttgaactggagaagatagagcgcatcatgagcaagatagatgccgaccccgaaagcgaagacgtgaaacatacagaacgcgttttgtggcagaaaatttacaagaaaagcgcccaaggccgccgtaccggtgtaggtatcacggcagaaggcgacatgcttgccgccctgggattgcgttatggtactgaagaggcaaccgagttctcggagaaagtacacaagacggtggcactcaacgcctatcgctcctccgtagaaatggccaaagagcgcggcgcattcgaggtatacgatacagaacgcgaaaagaacaatccgttcatcaaccgtctgcgcgaagccgacccggaaatgtacgaggagatgaagaagtacggacgccgcaacattgcctgtctgaccatcgccccgaccggcaccaccagcctgatgactcaaaccacctccggtatcgagcccgtattcctgcccgtgtacaagcgccgccgcaaagtgaatcccaacgatacgaacgtccatgtggacttcatcgacgaaaccggggatgcctttgaagaatatatcgtgttccaccccaagttcgtgacttggatggaagcacaaggatacaaccccgccaaacgctacacgcaggaagaagtggatgccatggtagagaaatcaccttattataaagcaacctccaacgacgtggactggctgatgaaagtcaagatgcagggacgtatccaaaaatgggtggatcactctatcagcgtaaccatcaacctgccgaacgacgtagacgaagacctcgtgaaccgtctgtatgtagaagcatggaaatccggctgcaagggctgtacggtttaccgcgacggttcgcgttccggcgtgctcatctctaccaagagtgacaagaagtccgaacttcccccgtgcaaaccgcctacggtcgttgaaacacgtcccagaatattggatgcagacgttgtccgcttccagaacaacaaggagaaatgggtggcattcgtcggcttgctggacaatcatccctacgaaatattcaccggtgtgctggatgatgatgaaggcatcatcctgccgaagaatgtggtgtcgggccacatcatcaagaatgtggatgagcacggaaacaagcgttacgacttccagttcgagaacaagcgcggatacaaagtcaccatcgagggtctgtccgagaagttcaacaaagagtattggaactatgccaagctgatttccggtgtattgcgctaccgcatgcctatcgagcaggtcatcaagctggtaggttcactgcaactggacagcgaaaacatcaacacctggaagaacggtgtggaacgcgccctgaagaaatacatccaggacggcacggaagccaaaggcaagaaatgccccaactgcggcaacgaaacactggtttaccaagaaggttgcctcatctgcaagacgtgcggagcttcccgctgtggataatcccacggcaagcacaaacgtttgcataggaatttaaatgacttagataacggtagctgcatgattatgaggaataatttctatacttgcataatcattgcagctattgctatttctaaatctaatataatatgacactaatattcaatatcgagtatcgcaccagctggggtgaagaagtcaaagtcctgggttccatcccggaacttggcaacaaccagcccgacaaagccacccccctgcacactgtagacggcattcactggaccgcggaagtggatatccagattccctgcaatggaaacgtcgaatacagttaccacatctatcgagatggcagaaccatacggacagagtggaacagcctgccgcgcatcctgcacgttgcagacaatccgaagaaagtttaccgcatagaagattgttggaagaatctgcccgaacagcagtatttttatacatccgctttcacagaatccctgctggcgcatcgcgaacgcagtgccaccccgaaaagctacaaaaaggggttgctgataaaggcgtacgccccctgcatagacagtgaccattgcctggcactctgcggaaaccagaaggcgctgggtgactggaacccggacaaagctgcccttatgaacgacatcgacttccccgaatggcaggtagaagtggatgccggtaaaatcagcttcccgctggagtataaattcgtcctttacaacaagaaagagcgccgtgccgtggcctgggagaacaatcccaaccgctatatggccgacccgcagatagccgccaacgaaacgctggctgtcggcgaccgttatgtatacttcaatcttcctgcatggaaaggttccggagtagccgtacccgtattctccctacgctccgagaaaagcttcggtgtaggcgatttcggcgacttgaagcgcatgattgactgggcagttgccaccaatcagaaggcggtgcagattctgcccatcaacgacactaccatgacgcatacctggacagactcctacccttacagtagcatctccatctatgccttccatcccatgtacgccgacctgaagcagttgggcagcttgaaggacaagaaggtgatggccgaattcaacaaacgccagaaagaactgaatgccctgcccgccgtggactacgaagctgtgaacaaaacaaagtgggaatacttccacctcatcttcaagcaggaaggggaaaaggtgctggcctcggatgcattccgtaatttctacgaggccaacaaggaatggttgcagccatatgccgtcttcagctacctgcgtgatgcctacaagaccccgaatttccgcgagtggcccaagtatgccacctacgatgccaaggagatagagacattgtgccggccggactctgccgactatccgcatattgccatctactactacatccagttcaatctgcacctgcaactgcttgccgccaccgagcatgcgcgcgccaacggcgtagtgctgaaaggcgacatccccatcggcatcagccgcaacagtgtggaagcctggaaggaaccccactacttcaacctgaacggccaagccggcgcaccgcccgatgatttctccgtgaacgggcagaactggggctttcccacctacaactgggatgtcatggagaaagacggctatgcctggtggatgaagcgtttccacaaaatggcagaatacttcgatgcctaccgcatagaccatatcctcggcttcttccgcatttgggagataccgatgcacgccgtacacgggctgttgggacaattcgtccccgccctgcccatgacgcgcgaggagatagaaagctacgggctggcattccgcgaagacttcttcctgaagccctatatccatgagtacttcctcggacaaatcttcggcccgcatacagactatgtgaagcagaccttcatagagccgacagacacgtgggaggtttaccgcatgcgtcccgagttcgacacccagcgcaaagtggaagcctactttgccggaaagacggacgatgacagcatctggattcgtgacgggctttacgcccttatcagcgatgtgctgttcgtgcccgaccgcaacaatccgcacgaataccatccgcgcatcggcgtgcagcacgactacatctaccgcgcactgaacgattgggaaaaggctgccttcaaccggctgtatgaccagtactactatcaccgccacaatgacttctggggacagcaagccatgaagaaactaccgcaactgacacagtccacgcgcatgctggtatgcggtgaggacttaggcatgattcccgattgcgtggcatgggtgatgaacgacctgcgtatcctttccctggagatacaacgtatgccgaaagacccgaaacaagaattcggccacactgactggtatccgtaccgttcggtctgcaccatctccacgcacgacatgtctaccctgcgcggctggtgggaagaagacttccaacagacgcagcgttactacaacaccatgctcgggcactacggtgccgcaccggcaacggccacgccggagctctgcgaagaagtggttcgcaatcacctccatagcaactccatcctctgcatcctctccctgcaagactggatgtccatggacggcaaatggcgcaacccgaacgtacaggaagaacgtatcaatattcctgccaacccgcggcactactggcgctggcgcatgcacctgacactggaacaactgatgaaggcagaaagcctgaacgagaaaataaggagcatgatagaaagcaccggaagataagaaaggattcttagcaaagcattattttaggcacggattacatggacaatcacggataatattgaaagcaaccgtgataacccgtataattccgtgcctaaaataattcgataagtttattccgaccctcacataattgtattctataaaaaacaatttcgcgctatttttatattttacagaatacaatccgcaacctgaatcgtaataaccagataccgatttgcccgtaccacaaaatatcagtaagtttgcagaaaacaatctacaagtaatgaccagttatattttccttgacacccttcgcttcttcgcccatcacggcgtgggcgaacaagaaaccgtggtaggcaatgagtttaccgtcagcctgcgcctgcaagttgatatccggcgtgcggcagaaacggacgacgtagccgacaccgtgagctatgccgatgtacatacagctgtgaaggcagagatggacattccttccaaactattggaacatgtatgcgggcgaattataaaccgattgttccgcgacttcccacagatagaagagataacgctcaagctagcaaagcgcaatccaccgatgggcgcggatatagaggctgcaggagtggaaatatgccaacgccgcggagaatgacagattgccgaatcaccccattcactattgatacacagacacttcccactgcaaagacactgcatgctttttgcaatggcgctgcaaacggtttgcagtaacactgcacatatatttgcagtagtactgcaacagctttgcagtgacgctgcaacagatatgcagtagcactgcaaaatgtatacagaagttctgcagtgagcatgcagcaacttttctgccgtagaataccaccattgataccaatattccgtacctttgccccatcatcaacaaaaagtcaatgagaaacgctatacaacgactggcattactccccatcgtcgctctcttcctgctaccggccgcttgccaccggacggacggacgggcagaagctttattgaacaacgccgactcattgctgacagcaaatccggacagtgctctgcgactgctggaggcactgcccgcaaccaccgaacttacacgtcgggagtctgcccgatacgccctgctgctggcacaagccacagacaaatgcgaaaaacctctgctaccctgcgactcgctactggacgtggcactggattattatgacgatgacgagcgcgaacgagccgtggcacttctctataaaggaagactggaagtggaaatggaacaaagcgaacgggccatcggcttcttgctagaaggactggaaatcataaagaaattcccccaagatattgaaaccagaaaatatctattcagctcattgggaaacgaatactttgatgcacggctgtacgagaaagcaggaaaggcgtatcaagaactttacaaatgttgcaccacggataaagacaagtcgatagcattgaacagccttgcctctttttatgctgtaacagaaaaagaagactctgcacttatacttcaatgcaaggctttggaatacgcccaaatatcgaaagattctgccatgattgcaacaatagcccttaatctcagtgtagaatattccagtaaagaagcgaatgatacagccttatattatgcgcgaatgtccttacaatggcttcccggaaacaaaaatagaagtgattatcacgccaatattggcaatatattcttggataaagaagaaagagattctgccatatattatataaacaaaaaaatagaagatagcacaaatataaaaggacgggcaaatgctctattaaacttatcttatataaaagaagagcaaggggattatcaagcaaccacagaattactatatcagtttgtagacatcattgactcaatatatttcaccgagcaatccaataagatacagcaacttatccataagtatgactcccaaacaaaagtaaaggaagaacagtttaaaggacaaaaaaaactaaggacagcgatcgcatgtttcacattctgctgcttcctcattgccctcttctatcaacatcgcataaacaaaagaaaaaggctgcaactcatcaatgagcaaaacctgaaacaagcccaagaaaagctcacttctttggaaaccaccatcgaagagagtcaccgcattgtagttctattgcagagggagcattctacattaatacaagaaaaagaaaaaaacaatcaagaaatacaagagcgggaaaaccaaataaagaaattgaaagaagaaaaactggctttgcgcaactggctgttcaaacaaagcgacatatacaagaagataataaaactctccaaacaaaacgtgtcaagtaaaaaagaacgaagtgtactgacagatgcagaactgaaaaaactaaaggaaaccgtattggatatttatactgattacatagctggcataaaagtccaatatcccaaattgacagatgaagacttattgtttctctgcttagatgaaattgggttctcttctcaaacaatatccctttgttttggcaatatcgacacacatgtccttgcccaacgaaaataccgcatgaaaaaggaacggatgtagctaaagaataagtaagtgtgatttttctaaacacaatacatctacaaatcaacaccttacaaaaaacaagtgtgattgatttcatgcttccattttagtttttccctctaactttgccgccataaatcgataaaacaacgaataatgaaagcaaagttatttatgattcttttagtggtactctttattgtaccgataagtggagcagttaataagccaagaaaacgcccagtccttttgaggaaacatgaaacacgcaaaaatgtgcttccacgcatccctatagactatactatagatgtaagcaataacgataactgtctgcaaatactatttcagtttccattgcatgaatccgacatcaccgtagcagataaaaatgggaacatcgtaatcaacgaacaacaaacctccatttacgaaagtaaagcattgtatatctatacgcctgaagattatccttatacaatagaaataacctcccctgctgtagacatcacgggagaaatcacattagaggaagaggattaaccaacatattatttacattttaaacaattaatcatgaagaaaattttatttcttgcaaccatcctattggctaatatttcatgccaagaggaagaaatcaacacacaaatcgagccttctgtaccccaatctaaaaaccttcaaattgtgcaaatcaccaaccaaggggaaattattccaatcaatggaactacaaccagaagttctgtagaaggagaacttgcactacgattcatttccgagtccgattaccaatcgactataacagaaatcagccacatgactgctaaagaaagattggaatacgtagacaactttatctctctgcagaaacttgccaacgaagcagacatggaattagatgaaatagacgcggtagcaaccagcgaagccgacttcagaaagagatatgcccaatacgtagaaaagtacagtgaaaaactgattacgaacaaatatgatgtagaagacttgacactgtacgttcccgatggcgacaacctctctacctaccttatcaatgaaaacaaaaaagtagtgataggcaatgaagtcaaagaaatttcactaaacaatgacatgagtagttctgagaaagcagtatttgctgctgatacgagagccggtgcaaccaacagatttgatttcaaagaaacagtaggtaaaaagaaaacaaccggaaatatagaaattgacagcagagcatacatcaatgtacatgtaggctgtcaaaagaaaatgtggtacggatggaaaagagacgacaatagagatatctattatcaagtcgctgcaagtcctatggcatatagatatatagatccttatggacaagaactttacaccaataacatacaatactttgcttaccataatgatggcgacaagcatgtaactgttggcagcttacagcccggaggaaaatatctttctggaacgttacgagtttggactgacaactctgttagtaatgtcaaagattctgtagaatataacaacgtgtatgcactctatgaaaataagctgggaaaattcaaacttcccaaacttaacaatagtgaatcttatgggggagacttttatattgtaaaaacaaactaagtcaaaaaagacatcgatacttaattttatcttacactatctgccattcttctttatacagaatgacagatagtaagtgctataaaccaactataattaccgatttacataatcaatgaaagcaatcataacttttatcttaggaggagtcttctgttgtatgcaagcctctgcccaacaagtcaaattcggcgttgaagccggcggcaactggtcgcactacaaaaacgataaatcgaaaaccgaacaagtgggaagcatgggaggcggtttccaactgggcggaaccgtggactatgagttcaagcaccattggatgttgatgtcgggacttacctggatgcaaacccgaagcagtatggagctgttcaatgccagcgtgccttacttccccgatacggaaataaagatgaaccacttgaacatccccataaaaataggctacaacatccgtatcaacaaaagcctcagcctgataccctacatcggtgtctacggctccatcaacttcaatgcaggtaaatgcgacgtaaagaacccttattatacaggagaaaccaatcattggaaacctatggacgggtattcatacatcgtgccgacagaagcagacatcccgtatgaatatgaagctaccatagacgctttccgccgttggaattatggtgcggtgggaggcatgaaagcagtaatagcaggcagatacaccgtttcactccaatactacgaatccataaagaaagtacagaaacaatgtaacctacgcaactatggttatcagctcagcgtaggctatcaattctgatacaaaaactaaagtctataagaaagttgcacatacccgacacaagggatgtgcaacttttataatcggtttaaatttatcagcttcagcatcattcaccttatctgtttttcgttcaaacatctttcaccagaaagcactgtcaatcaactacttctttgtaaaggtgaaggttataaagcacaataaaatgcctacttcttccgtttccgcttctttgccgattccaccgcttcggccaccaccggcttatttgcaaaccgcttggtgtagttgctataatcgggaacagtgcgttcatacgtcgggtcgacaaacaacgggctggaaatgatatggtctgccgtactgcggttgcagcagaacacgatgttctccacaccggcaaggcgagtcaacgccttcacatccgtatcgtgcggctgaagggtcatggggtcggtgaaaaagaaaagatagtcaatctctccgtccacaatgcgcgagcccatctgctggtcaccgcccaaaggaccggatttaaggatagtgaaatcccactccacatcaggatgtttctcccggagggcttcgaggataagggtacccgtggtgcccgtacaatagaatttatgccccatcagcaattccgagttccacagtacccactcgatgaggtctttcttcatggcgtcgtgtgccactaatccgatttttctaattagtttttccataattcaaaacctttaatagattgaacaattataaaaggcaacagttcctacaattgggaaaagaatttctttccatgcagataaaactgcgccaatatactgctttttgtccgttccggtattacggcaagcgtagtttttttcagattctctttgcgggacgctgccaatgaagcgcggaaggagtggtaggcacggcgcgcacggaatacggccaaagcattgggaaactggcctttcagcatgaaactgaacgcagccacataatcgagcaccacacgtacacgcatcacggacgccaagtcctcctgcggcagattcttataaagcatgacaaggttattacgaaaattgaggaaggtcttgcgcggattctccttcttcaaagtggcccctcccacatgaaataccacactctgcggtatacatgccaactgtctgccacgggcacgaagccgccaacataaatctatctcctccatgtgggcaaaaaaacgtccgtccagcccacccgcttcccggtaatccgccagacggatgaacagagccgcccccgtagcccagaaaatgggtatcaccgtgtcgtattgccccttgtcctcttctaccacgcccataatacggccgcggcagaagggatagccatagcggtcgatgaaacctcccgcagctccggcatattcaaactgccccttgttacgccaactgcgtatcttcggctggcaagcggccgtctccagatgggcatccatatactctgccaacgggacaagccagtgctcggtgacctctacatcggagttgagcagcactacatattctgcctccacctgcttcaatgccagattgtatccgtcggcaaaaccgtggttctcttccagcagaatcaagtgcacagaaggatactcacgacggagcattgccacggaggcatccgtagagccattgtctgccacatacaccacagcaccatccgcctccgaaaaatgcacaacagagggaaggaaggaacggagcatatcacatccgttccaattcaatatgacaacagcaatcttatccatgttgcacagattcttttcgtttctttttccaacgtttatgagaccagaaccaataagccggttcacgccggatggtctgctccagacgacgggcgaagcactcggttatctcgccatccgccgtctgcttgggagtttcggtaaccaagtcgaaaagcactttgcaatatcctctggatgtccgttccaattcacaataaaagacggggaagtccatcagcttggcaatgcgctcggcgccatccatgaacacggtgtcctgattcaagaaagtagtccaataatgggcctcgctgcggttgggcgactggtccgtaatcaggccgatggctatccgcctgccttcacggcgaagctttatcacttcgcgtgccgtggaatgtttcgccacattatatcctccgaaccgggcgcggatatgcttgaacatctcgtccagatacttattgcttagcggtttgtacacctgcaccgggatgtcgcccggatgcatgatggcccccatgcctataatccactcaaaattggcataatggggaatcagcagtacaatgcctccatgcttctctatcatggcaaggtattcttccttattatcatacttcatccggcggcagagctcctcgaaagacatgcgcagcatcttcacctcttccagcatataatcgcagatataatgatagaatttgcgctctatctccatcaattcggtttccgacttctccggaaaggaattgcgaaggttgcggcgaacgactttcttccgataatgcacgacgtggcgcatcaggaagtacagcccgtcagacaacgcataaagcacccggaaaggcagaagtgccacaagccacatgcccgcataagtcagccaatagacaatttttgatttcacttcgtcagttatgagttataagttatgagttatttgttgcaaaggcggcattcctcattccattgctcccaagagtgcggtgccgtcggcattgaaatcgcccaggcgcacagacacgagctggttgtccaaggcagcatcatgagggacttccacacggatataattgggagtgaagccgtgcatcggcagtccgggtttgggacgttccagcaacaccggcatcgtctgcccgatatggcgcgcataaaaagcacgggtcttttcgtccgaaagctccagcaactgctggctcctgcggtgcttttcttcgggtgccaccacgtggtctatctttaaggcatgcgtgccgggacgctccgaatagctgaagacatggagctgcgtcacgtccaggctcttgatgaactcataagcctgcccgaaatactcctccgtctctccacgggtacccacaatcacgtctacccctataaaggaatcgggcatcacttcctttatcttctttatcttcgaggcaaacaaggcggtatcgtaacggcgtcgcatcagcttcagcacctcgtcactgcccgactgcagcggtatatggaaatgaggcatgaaatgccgggaacgggacacgtattctatgatttcatctgtcagcagattcggctcgatggaggatatgcggtaacgctcaatgccttccacctcgtccagcgccttcaccaaatcgaagaaagtctcaccggtagacttgccgaagtctccgatattgacgccggtcaatacgatttcctttccaccttcggcagccgcctggctggcctgctccaccatagaagcaatgctgccgttacggctacgtccgcgggcaaagggaatggtgcaataggaacaataataatcgcagccgtcctgcactttcaggaagaaacgggtccggtcgccacgcgaacaagacggggcaaacgaacgtatatccttcaaagcggaagtgtaggcctcgccggtctcgtgcttctgtagattgcccaggtagtgaagcaagtccttcttctgctcggctcccagcacgacgtccacaccttctatctttgccaccgtctccggtttcagctgggcatagcaaccggtcaccacgacaaatgcacccggatgttgcttcaccagtttgtggatggcctggcggcacttcttgtccgccacttccgtcaccgagcaggtattcactacacaaatatccgctttctcacccttgcgcgccgtacgtacgcccgcttcccgcaaaattttaccgatagtagaggtctccgagaagttcagtttgcaccccaacgtatagtaaaccgccgtcttatcttgaaatatattggtatctatcatgagcttataaacacatttatgctgcaaatatatacattattaatctatttttcctacttttgcacactcaactaaaatttgtgcaatgatacaagagaactttatcaaactatacgagcatagtttccgcgagaattgggacctcccctgctataccaactatggagaaaacgagagctatacttatggcgaagtggcacaagaaatagccagactgcaccttattttcaagtactgccaactgcgccgcggcgacaagatagccgtcatcggcaagaacaatgcccgctggtgcatcgcctatatggccaccatcacctacggcggtatcgtagtccccattctgcaagacttcaaccccaatgatgtccatcatatcgtaaaccactccgaatcgacgttcctcttcaccagcgatgccatttgggaacatctggaagaagaacggcttaccggaattcgcggtgtgttctcgctgagcgacttccgctgtctgtatcagcgggacggcgaaaccatccagcgtttcctcaagcatctgggcgatgaaatggaagcgacctacccgaacggattccgtaaggaagacatcgtttacacggacctttccaacgacaaggtcatgctgctgaattatacctcgggcaccaccggattcagtaagggcgtcatgctgacgggaaacaacctggccggcaacgtcaccttcggcatacgtaccgagctgttgaagaaaggggacaaagtgctctctttcctgcctttggcacatgcatacggctgcgcattcgatttccttaccgccacggccgtcggcacacacgtcacactgttgggaaaagtgccttccccaaagattctgatgaaagctttcgaggaagtgaaacccaacctgattatcaccgtcccccttgtcattgaaaagatatacaagaatgtcatacagcccatcatcaacaaaaagaccatgaaatgggcgcttagcattcccttgctcgacggacagatatacgggcaaatccgcaagaaactgattgacgcactgggcggacgtttcaaggaagtcatcataggaggcgcggccatgaacccggaagtggaagaattcttccaccgcatcaagttccccttcaccatcggctacggcatgactgaatgtgcccctctcatcagttacgctccctggaatgaattcgtcccgacttcctccggacgggtactcgacatcatggaagcccgtatctacaaggaaaaccccgacgacaaactcggcgaaatacaagtacgcggcgagaacgtgatgaccggctattataaaaatccggaagccaccaaagaagtcttcaccgaagacggatggctccgcaccggcgacctaggcacactggacgagaacaacaacctctatatccgcggacgcagcaagaccatgattctcagttccagcggacagaatatcttccccgaagaaatagaagcgcggctcaataacatgcctttcgtcctggaaagccttatcatcgaacggaacaaaaaactggtagcattggtgtatgccgactatgaagccctggattctttagggttgaaccagccggacaatctcaaaactattatggatgagaatctcaaaaatctgaataacagcgtggcaacctacgaaaaggtaagccaaatccaactttatccgacagaatttgagaaaacgcccaaaagaagtatcaaaagatacttatacaatagcattgccgaagattaatatgttgtagaacatatagatagggataaaaacagccgaagctccaaaaaaaatataaaaaaagttggggtttcgagaacaacatattcaaaaagtacatacctttgcaacgttttaataaagcaattgattgtattacgttttaaaagtaaagaaaatgaaaaaattagttttgatggctgcagctatcgtagcagtatctttcgcatcttgtggcaacaaagcagctaacgctgaacaagcaactgcagattctatccgtatcgctgactcaatcgcagctgtagaagcagcagcagctgaagcagcagcagccgcagcagcagctgacactgtagcagtagatagcgcagctgttgtagctgaataatttcagtacaacactcgagagaattgaaagtctgacgtgcatacaagcacaccagactttttttatgccctatcctctcattcttttcccttccaattgttaagtcttggtcttatttcacaaaaaagggtataatatggcagataaatgataaagtatagtgcatataccaaataaaaaacgttactttgcatcaacaaaacaataagaggtttattacgatctgcgtttcattatgtctctcctcgattaaccacattgagaattttcatttctgactacaacttcctaagactcctttattgaattattaattttttatttttgtattttatgaatatgtacattggaaaccttagctacaacgttagggaatcagatttgagacaagtaatggaagagtatggaacagtagaatcagtaaaactgattatggaccgtaatacaaacagatcaaaaggttttgccttcgtggagatgcccgaagctgctgaagcccaacaagcaatcaacaaactgaatggagcagaatatgtaggccgccagatggtagtaaaagaagcattgccaagaaactaaaaattattgactgacaataagcaagggcatatcttaataataagatatgccccttctttgttatttgcatttttcctttatctttgataaaacatacgttcaaaaaaacatgaaaacaaaactgatagaaaaagcaaaacaaataagcactgaatataaatttggagacttcttccgtaactttcttgctgtcatattgggtattatcatcacctttgcaggaagcgactggattacagaacacaatgcccaaaaagaagtgaaggaatccatactattggtaaaaagtgaattgcaaacgaaccgtgaagatatagcatatataaaagaattagtagaactggaacaaaaaggcgccttatatctattggaatacaaaggtagaatacaggaggccgacccggattctttacaaaaatatgatagattacccttccaaagcatttcttttaatgcaatgtacgacgcattggaaatgctcaaagcttccggcctcattcccaaaatcaaaaacaaagaactgactgtgcaaattttgaccgcctacgctatagtcaggaacagccaaagcgctttcgattcatacggcaacataaaacagcgttgcctggaagagttgatgaaagtccccgatgtcaaaaaaagaatgaattccaccaactatattgattggaatttctacttcaaatatccagaaggagtcgctctcatacagcaaatcccccaaatacaaagtactgatatttaccaaaatcatttgaaagcaatagacaaagtcattgcagccattgatgaagaatacaaccaataaaatctcaatcacatacttatgaaaaacaagctgaaaaaaatctttgtctgccccaccgttaaaaggcgattgggagattttatctgtaacttcacagcagttgtattaggcatcttactgacctttgccggcagtaacctcattgaagaacataaaaaacagaaagaacttaaggatgcactattactggtcaaaaatgagatgttactcaaccggggatacatgacacagatgatggaaagagaagaatttgaaaaacaaggagcttcatatctgcttcagcacaaggaaaacattgcaaaggtagcacccgactctttagagaaatatgggaatttaccctttcagacacagaccttcatttacattaacgatgcaatggaaatgcttaaaacgtcctcgctcatgtctgccatcagagacaaggaacttgcgactcaaatcattaaaacatacaatgcaataaaaggctcctatgaaacctttaattcatttatggaaataaagcaaaagaaggttgataaattaatcaataaaccggaggtacaaaaattcttgaccaatgatgcagattactcaacagcagaagaatggacttttttctttaaatttccggaaggaatccagttaattcagcagatatatttcacccatgacagtccaacccgtatgtacaacagatttatcaagcagattgatgaaacggcatctgccattgacgagttctacaaatagtggccaatttgcgattcaaacaaacaaaaagccccatttcttatacaaagaaatcgggctttctatttatagcgtacttatttatgcttcttcagcaaccacctcaaaaggaacttctacagaaacttccttgtgcaacttaacgatagccttgtagttgccaacttctttcacagcatccttcacaacgataatcttacgatcgatattgtgacccaatttagccagctcttcagcaatctggatgttaccaacagaaccgaaaatagtaccagtggagctaaccttagtagcaatcttcaatgatacaccttccagcttagcagccagttcttcagcatcctttttgattttctccagcttgtgagcacgttgtttcaactcttcagccaacattttctttgcagccggtgaagcgataacagctttaccggtcgggatgaggtagttacgaccgtagccagactttactgttacgatgtcgttcttataacccaagtttacgatgtcttctttcaatataatttccatactttcctcctcctattatttcatcatgtcagttacatagggcagcaacgccaagtgacgtgctctcttcacagcttgagctacacgacgttggaacttcaaagaagtaccggtaatacgacgcggaaggattttaccttgctcattcaagaatttcttcaagaattcaggatctttgtagtcaatgtacttaataccgctcttcttgaaacggcagtattttttcttcttaacgtctactgagggtggagttaaatatctgatttctgattgaacttgttgtgccatgattaatcctcctttttagttgatttaacacttcttctcttcgcagcatattcagcagcgtacttgtcttgtttgaaagtcaagaaacggataacgcgctcgtcacgacggaagtttacttccaatttttcaatgacagtaggttctgcattgaactcaatcagctgatagaaaccggttgacttcttctggataggatatgccagcttcttcagtccccagttttcttcatttacaatctcagcaccttcagcagtaaggatgcctttgaatttctctaccgcttccttcatctgaacatcagacaaaacgggagtcaaaatgaaaacggtttcgtattgattcatactcgtttaattaaataaataaattattcgttttaaaaatgcggtgcaaaggtagacattttattttgaactacaaacatttaatgtttttttgtgtagggatataggaattgtcttcagcttgccttatctttgcaaagttgtttaaacaataatttcatgatagagcaatttaactttgatatccgccttatctttgccatactgaacggcaaagtgtcggctgccattaaccgcaaactgttccgtaacttccgtcagaacggtctggagattactccggaacagtggactgtcctcatcttcttatgggaaaaggacggggtgacacaacaagagttgtgtaatgcaactttcaaagacaagcccagcatgacgcgcttaatagacaatatggagcgtcagcatctcgtcgtgcgcatatcggacaagaaagatcgccgcaccaatctgatacatttgaccaaggacggcaaggaactggaagaacgtgcgcgcgtcattgccaaccagaccctcaaagaagccttgaaaggcatcaccatcgaagagctcagtgtgagccaggaggtactgagaaagattttcttcaataccaaggactaagatatagggattagggcttaaggattagagattaagggaggagaaaaaaggggatgaagcttcatttttcattcctcattctccattctttattaaaatatggattttttgcaaaaataatttcgcttgttaaagaattatgcttttctttgtgacaagaatacgaaagaatataataatctaattaaaatacacacacatgaaaggtttattaaaaaatctgggattgatattagtcgtaataggagctgtaatcctggttgcatgttcttttaccggcaatgttaacaacaatgccatcttgggcagttctgccgttttggttgtagtgggattgatttcctacattgtcatcaacaagagaattgccgactaatatcaaaaggaaagaaataaagaaggcggtttgcatatacatgcaagaccgccttctttattttctcttcttctcttcctcccaagccaagtctcatcaagactcagcctccggagtaatcagtttatatccctttccgtgaatattgatgatttcaattgaatcatcttctttcagatgcttacgcaacttcgtgatatatacatccatactacgtgcattgaaatagttgtcatcaatccagatagtcttcaatgcaaaatcacgctgcaagatttcattggcatgtgcacaaagcaaacccagcagttcagattccttggtggtcagtttggtctgcttctcagcagtcgccagaatctgtttctgcgtatcgaatgtaaacttaccaatcttatagatgttgctctccttgttcttctttccgcgaacgcgtcttagaatagcttcaattctgaaagtcagttcttccatactgaagggcttggtgatgtagtcatcggcaccaatcttgaaaccttccaaaatatcttccttcaacgtctttgccgtcaagaagataattggaatttcggcgttggccgcacgcacttcctgcgccagtgtgaatccgtctttcttcggcatcatcacatcaaatacacacaagtcatatttattcttcaggaaagccttgtatcctgcctctccatcgggatataactcggcggcgtaaccttttgcctgtaaatattctctcaaaagcatgccaagattttcatcatcttcgcacaataaaatacgcagtttctcgtccatatcaatcaattttttaataaaggtaatgcaataataaatttagttcctacgttcagttcactttctgctcggatagttcccttatgatccatgataatcttcttcacataagccagtcccaagccgaagcctttcacatcgtgcagattacctgtatgcacgcgatagaacttctcgaatatctttttcaaattctcctttttgatgccgatgccgttatcttggatggaaatcatcagtttgcccggctcattccaggtcttcaccgtcaattgcaaatccgcatccggacgtttatacttcaccgcattatccatgaggttgaaaatcacattagtgatatgcatctcatcagcaaagatcacgggatctgtagcttcaagctccgattcaatctttccattataacgctccactttcagcgtaaacgtattgataacacctgttatcagttcattagcatccagttccttcatcttcaatgtagccttctggcggtcaaacattgacatctgaagcactttctcaacctggaatctcaaacgcttcgtctcatcgtttataacacccgatatatgctggaacatggccggagacttgcccacagccggatctttcaacatttgtgccgccaacgaaatcgttgaaatcggtgttttgaattcatgcgtcatattgttgatgaaatcattcttcatctccgtcagttttttctggcggaatacgatgtaaatcgtaaagatgaacgtcaccagcagtacaaaagtaaatatcatcgacggtatcataaacctgaccgaatcaaagatataatccttctttcccggaaaatgtatcttgacgatactcatacgggcaggcggatcattcaaaaacaatggctgcgaataagaactttcactcccaacatcgctataatccgaacaacggtatacttctctaccctcccggtctatcaccttaaaatgatagtccatatcaccgagaccattttctatcagaccagctttaagatactggtccagacttttgaaattaacacgctcttcaatcggcttgtcactggcattatataccatctgcaacacaacctcatctaccaatgcacgctggtaaagatagcgatttttaagcatctctatctgcgagcgtgaagtctggggaattgtttttaccccatgtttgcgtgaaatcattgctcttggcaattcagaaggctcattgctgaaagtcttcaattccaccgaagaacggacactgccatccggagctgtcatcacaaaccgctgggtccgcatcactccgctactgctttgcgattgctcccatgctttcttttccgcctcggagatatcctcattcagccaacgcacaacctccgcggactccgcctctttcgaagcagccatcaatgcacgtttcaccgcctcctcaaattgtccgttacgcatcttcaccatctcctcaatatagccaatctgcaaatacagcaaactgaggaaggaaagacccataacaacacctaatatccatatagttgactttttcatagtcacaaaattaacactccctaattaacactcctaaccaattaacctgatttaaccggacgttctcgtaaattaaccgaagaccattttttaggttgtattatgagcattataacaaaaacacaagtctttggtttgcaaatttaataaaaaattaatcattcaattcacaattccacatgttcttaatctacgttaatgaaaaaagccgtcattacttgccatgaagtaacaacggctttaacaattgttatattagcagccggtagttacaacagccaaactaccaactcctgaaagtcattcttcagcttgcttagcctcaaattccttaatcagtttatcctgcacatcactcgggacgagttcatagctggcaaacttcatgatgaacgaagcacgtccaccggtcagtgaactaagtgccgtagagtaggatgacatttccttcaaaggtactttggcactcaatttttcgtaaccggcctcgctgctcatacccataatcatggcacggcgtccctgcaagtcacccatcacatcacccatcttgtccgacggaacaaatacctccacgtcataaatgggttccagaatcttcgggcctgcattcttgaacgcttcgctgaacgcgttccgtcctgccagcataaaggaaatttcattggagtcaaccgggtgcatctttccgtcatatacgatgacacgtacatcacgggcatacgaaccggtcaacggtccctgctccatacgtgacatgatacccttcaagatggccggcatgaaacgtgcgtcaatggaaccacccacaatactattgacaaataccagcttgccaccccattccaatggaacttcttcggtacccttgacgttcatcttgaactcctgaccattgaatttataggtttcgggcaacggcataccttcgtagtaaggctcaacaatcaggtggacctcaccgaactggcctgcaccacccgactgtttcttatgacgataatccgcacgggcagctttcgtaatcgtttcacgatacggtattctcggttcttcaaacttgacttgtagtttctcgttgttttccagacgccacttcaaggtacgcaaatggaattcaccttgcccgtgtacaatagtctgacgcaattctttagactggtctatcacccacgtcgggtcttcctcgcgcatacggttcaaagcaaccatcatcttttccgtatccgactcgttcagcggcttgatagcacgtgaatatttggagttcggatatttaatgaagttgaaacggttttcagagcccttaccgttcaatgtattaccggtatgtacgtccttcagtttcaccgtacagccgatgtcaccggctaccatttcctctaccttgatacggttggcaccggcacaagcataaatctgcgcaatgcgttctttggaaccacggtctgcattggtgaagtcatcaccttcgtgcaccttgccactcataaccttgaaatactggacatcaccgatatgcggttcaacggcagtcttgaagaaatacaaggaagtcggtccatcagaatccggcttcaccacctcaccgcgtgtattgtgcaccggtggcatttcgtccacaaacggcaccacattacccaggaattccatcagacggcgtacacccatatccttaccggcacagacacagaataccgggaacataccgcgtgaagccagtcccttgcggataccttcgcgcatttcgtcttctgtcaaagagtcctgctcaaagaatttttccataaggccttcgtcatgttcggctgcagcttctaccaaagccttgtgcatctctgtagccttttccatttcttcggccggaatctcttcaatagtgggagcgccaccttcgggtccccacgaatattttttcatcaaaagtacatcaatcaacgaattaaaattcggtccggtagccagcggatattgcacgggcaccaccttcggaccgtatatggtttgcaactgctcaagtaccatgtcataatcgcacttttcattatcgagctggtttaccaggaaaataaccggtttgcccagtttctcggtatagcggaaatggttctgcgtacctacctcaggaccgtattgtccgttcagcagcagtatggcagtatcagtaacgttgagcgccgtcatggcagctcctacaaagtcatcactacccggacagtcaatgatattcagtttcttaccgttccactccacatggaaaacggtggaaaacacagaataaccgtattcctgttccaccgggaagtaatcgctgactgtattcttggcagtaattctgccgcgacgttttataataccactctcaaagagcagcgcttctgtgagagtggttttacccgagccgtcattgccaaggagggcaatgttcttaatttcattcgtctgatatactttcatgatatattaagattttaagtgaataacctgacatacgatgatgccgttaactttttgtgaggcgcaaattaggcattaattcaaagaaaagcaacatcgggaagcatgttataaaacacaataccccctacctataacttaagaaacaagtgcaaaccaaatagaaaagacagaaaaacatcacaaaaaggagagattatagctctaatctctcctttttgacacatttacataccctccatttctcaactttcgcatatctttgcccaaaacataaacgatttattaattatctaataccgaattcttaaatgaaaaggaaaattatttggagttttgcattgctggcctgcctttgctgcctgccatctgcaaaaacaaaagcacaaacgaaaaatgccgcaatcataccaggggaagtatggaaagacaccgacggcaatcccatcaacgcccatggcggcggccttctttaccacgaaggaacctactattggtatggcgaatacaaaaaaggagaaaccatcctgcccgaatgggctacgtgggaatgctaccgcaccgacgtaaccggtgtcagctgctactcttcgaaagacctgctgaactggaagttcgagggtattgtacttcctgccgtgaaagacgacgagaaacacgacctgcaccccagcaaggtgctggaacgtcccaaagtgatttacaacgagaagacaaagaaattcgtcatgtgggcgcatgtggaaagtgctgactacagtaaggcatgtgccggcgtagcggtcagcgattctcctaccggaacattcacctatgtaggcagtttccgtcccaacggtgcgatgagccgcgaccaaacagtgttcattgatgataacggcaaggcatatcagttctactcttcggaaaacaacgctaccttatatataagcgagctaacggatgactacctgaagcccactggtcgctatacacgcaatttcgtgaagcaaagccgcgaagcacccgccgtattcaagtataacggcaaatactatatgctctcttccggttgtaccggctgggatcccaatgttgccgagctggctgtagccgactccatcatggggcaatggactaccatcggcaatccatgtaccggtcctgatgcagacaagaccttctatgcacaaagcacttacgtgcagcaaatatacggaaaaggaaatgcctacattgccatgttcgaccgctggaaaaagaaagaccttgaggactcgcgctacgtatggctcccgcttgaattcggcaaggacggaacaatcacgataccctggcgcgacagctgggacccgcgtacccaatgggaaggacaaggcgacttctctgccggcaaaggaacattcctattgaacggcaagccgtttgtctcaaagccgcagaactgcactatccacgcatccccaaggcctattgggaccaacgcatcaaaatgtgcaaagcactgggcatgaacacagtctgcctctacgtcttctggaactctcatgagtctcagccgggtgtattcgacttcaccgggcagaatgacttggcagaattctgctgcttgtgccagcagaacgatatgtatgtcatcctgcgcccagggccctatgtctgtgccgaatgggaaatgggcggactaccctggtggttgctcaagaagaaggacatacgcctgcgcgaatccgccccttacttcatagaacgtgtaggcatctttgaaaaagccgttgccgagcaggtagccgacatgaccatacagaacggaggtcccatcatcatggtacaagtagagaacgaatacggctcctacggggaagacaaaagttacgtatcgcaaatccgcgacatcgtacgcgccaattaccccggcgtagcactgtttcaatgcgactgggcgtccaacttcaccaagaacggactccacgacctggtatggaccatgaacttcggtacaggagccaacatcgaccaacagtttgcaccgctgaagaaactccgtcctgatagcccgctgatgtgctccggattctggagcggctggttcgacaagtggggagccaaccacgaaacccgtccggctgccgacatgattgccggcattgacgagatgttgtccaaaggcatctccttcagcctctacatgacccacggagggaccaactggggacactgggcaggagccaactcacccggattcgcccctaacgtaacctcttacgactacgacgcccccatcagcgaatcgggacagaccactcccaaatactgggaattgcgaaaagcattgtccaaatacatgaacggcgagaagcaggctaaagttcccgctttaatcaagcccatccgtattccgtctttccaatttacagagatggctcctttgttcgacaatcttcctgctgccaagaaagactgcaatatccgtaccatggaggaatataaccagggattcggaagtattctctaccgcaccacactgcccgagatgaaaaccccgtccctgctcactgtgaacgatgcgcacgattatgcccaagttttcctagatggcaaatacatcggcaaactggaccgccgcaacggtgaaaagcaactggaattccccgcctgccccaaaggtgcacgcctcgacattctggtagaagccatgggccgcatcaactttggacgtgccatcaaggacttcaagggtatcacccaaagcgtagaacttaccgtagacatcgacggccgtcctttcacctgcaacctgaaggattgggaagtctataatctcgaagatacatacgatttctataagaacatgaagttccagcccatcggctcactgaaagatgagttaggacaacgcattccgggttgctaccgtgccacctttaaggtgaacaagcccagcgacacattcctaaacttcgagacttggggcaagggacttgtctacgtcaacgggcacgccatgggacgcatttgggaaatcggcccgcaacagaccctctacatcccgggatgctggttgaagaaaggcgagaatgaagtgattgtcttcgacatcatcggtcccaaagaagttaagtccgaaggactgagcgagccattgctggaccaactactcgttaccaaaccgctgacacaccgcaatgagggtgaaaatctcgacttgtccggtgagcagcccgtcctctccggcagcttcaatcccggcaacggttggcaggagcgcaaattcgaccaacccgtcaccggacgttatgtctgcctggaagccttgagtgcacaagatggaaaagacctagcttacattgccgaaatgtatctgctggatgagaatggggaacgtctgtcacgcgaaccctggattgtcaattatgccgacagcgaagacgtatcccacgtcaactgttctgcggacaaaatcttcgacctccaggaatcaacctattggagcacaaccaaagacactccatacccgcatgctgtcgtgattgacttgggtagtacccgcaccctgaccggcatgcaatatctacccagaatggaaaacgaggtaccgggtggaatcaaggacttcaaggtttacgtaaaatccaaggctttcaactattaagtcggacttacatacgctaatagattatttagacatggattacacgaaaaatcaatcaaacagattttccgtacaattcatcgtctaccacagccagcattgccttcgtactgcgcaaatgcacaaagtgggtacgcttggcaaacttccttgccagttcatgagtatcattctgttcaccggtacccaatgaaccggcataaaaagtcaggccattatgaggattgtccactgccctcaatatcgaggtaatatccgcctcgtctgtcacaatacgcgacccccaatacctgaaaaggagggtcattagggtgtatcacatattcatcccatattcttcgcacacctgcatgatgacagacaagaaataacgcatatttcgcgtaaaacctcccagtctatccctttgtatagcgccagcaaacgcttgaataggaaatgtctcatcttcctaggaatgttgcaagtccgtgcgaatccagtcaatcaccggcattaggttgtaacataccgtctggatgcctgccttgccgagattggcaagagttatcttgtccttcttgccaaaccacctttttgcaaaagtaagaaagaatatggaaactgtccattctgaatagatagatttgtttattcgcaatgaaaacaatatcttagcatctcattacaaaaataactcttatgcaagacattataaacggacgttgcggctggtgcggaaccgacgagctgtatgtgaaataccacgatgaagagtggggaaaaccggtaacagacgacaaaacactattcgagttccttgtattggaaagtgcccaggccggactaagctggataaccatcctcaaaaagcgggaaggctaccgcaaagccttttgcaatttcgatgcctcacaagtggcgcaaatgactgacgaagacgtggaacggctgatgcattttgacggcatcgtgaaaaaccgtctgaaaattaagtcgaccatcaccaatgcacggctgtttcttgccatacagaaagaattcggcagcttttacaactacacgttatccttctttcccgatcggacaccgattatcaaccacttccagtcattgagtgagattccggtatcgtctcccgaatcagataccatgagcaaagacatgaaaaaacggggattcaagttcttcggctctaccatctgctatgcccatctgcaagcttcgggatttatcaacgatcatctgacagattgcatttgccggaaaaggtaagttgtatcatgatataaacgaagaaatatacaaaagcaaacaaagcatcaatagcaaagcggtcgcctttccaatggggagggcgaccgctgctgtgttatgaaaccagtggtttagtacgcagtaaatgttattctattccgatgctgtggcgcacgggagaaaggatgaacgtaaactcataatcagcgtatggcaccaggtactccggacgcgcaatacgtccccagctgtcctcacaacccagaccagcttgtaccttgtcgatacagagattagtcaaatcagcctcttccacttcttgcgagtgtccctgctgcttgtccaaaccctcgtccaaagactcgatggtatagtgcaaggccgatgcggagaagggggcttcggccacaatcttaatgccactgccagactgattcaacatcttccaccagcggatatcggtctttgttccgttttcctgcggacggatataaggatagaactgctctgtcacgctctggcgatagatgcctaaatctgtgcaatggttacggtcgctatagttctcaaccggaccgcgtccgtagtattcgactgtttcgaaactgcggggcatgggcatctgcaaaccgaaacggaacatgttcgaaactttggcgttcttgtcggctatcagcttctgggttatcttgatggcaccggcattgttgatgacatacgtcaaggccagcttagcggaaacacctggcatatcgtaagctgattctactatgacctgattgttctccgtacgctggttgaaagaagtcaacttgatttccggattcttccaaacgatgtacttgcgttgcaggcccgcaccgaaatcattgtcggtcggagcacgccagaagttgggcgtcaaggcctcaccgtccttaatcatattctgtccgttcacttcgtacttggtcaggtaaccgttgtgcttgttgatttctacccggaacgcatcacctgaaacgatgagatacttccaatcgttatcctgcacttggggagccaccacctctacattgctctgcacgcagttcttcagttccatggaaggagccttgtagggattgagtgccagctggtccttggccaccacatggccggcgggaagcagaccctcgcggttcttcagcttataggaaacgttcagcagccattcggtacattggcaggtcttgcccaaatccagtttaatcttggctgtctgccgaggagctatattcagattatccacgcgaccggtacgaattgccttgccgcctttcagcacctcccactccatgtaataggcagagaggtcgcggaaaaagtactcgttgaacacattgatttcaccgttctccaagtcggccggagtagtccagatgtcctgatagatacgccccacttcgtacatgtgaggattgggcacacggtcggggctgataagaccgttatcgcagaagttcacatcactggcatcgaagcggttgaagtcgccgccgtaggcataaatcatcttgccgttcttgcccgtccaacggggagactggtcaacgaaatcccagataaatccgccttggtatttgggatacttgcgaaccaaatcccaatactccttgaagcctccttcagaattgcccatggcgtgagcgtattcgcactgaatgagaggtttcgtcatggaggcatcctcacaatacttccggcagccctcataaccatagtacatagggcagtaaatgtcagtcttgcctgtcttaccggcttgctcgtactggcaggcacggctggggtcttcggctttcacccaatcgtaggcggcctcgaagttaggaccatagccggcttcgttgccgagcgaccagaagatgatgctgggatggttgaaactgcgctgcacgttgcgctgattgcgttccaagtgcgcttttctataatcatcacgcttggcaagggtctgctcgccgtagcccatgccgtgagactcgatattcgcctctgccactacatagataccgtactggtcgcaaaggtcataccaaagattgttgtcgggataatggcaggtgcgcacggcgttcaagttgaactgcttcatcacctggatgtcctgcagcatacgttcgcgagagatgacataaccgccgtccgggtccatctcatgacggttggcgcccttgaagaggacggggtggccgttgacaagtatctgttctcccttcagttctatcttgcggaaacctacctttacgggaatcacttcactgctgccttgcagggtggcacgcagggtatacaagtagggtgtttctgccgtccatttatgaggattctccacatttatcagggcagtgccactgcctttggcagcagctgtagccacctgctttccggcagcgtccagcagttcaaggctgacgttaccgccacccttcacatcgagctgcactctcaaggaaccgttgcggtagtcggcatccaggtcgggagtgacgcggatatcctggatgcgtttcttgtcgcgggcatagagatagcaatcacgccctacaccgctgtagcggaagaagtcctggtcttcgagataggtaccgtcgcaccagcggaatacctggaaggcaatcagattcttctggccgggcttcaagtaaggggtcaagtcgaattcggcttcgagcttgctgtcttcactataacctacataacggccgttcacccacagatacatattggaggtgacagagccgaaatgggcgatgatgtccttattcttccagtcggcgggcacggtaatctcacggcggtaagaacctacatgattgttctcgacgggcacctgcggcgggttgttctggaactggttgcgccaggcgtagccaatattcacatagataggatcgccaaagccgttcagttcccacacgccggggacggggatgtcgttccaacctttgtcattgtagcccacacgccagaagtcggtagggcgagcatcggcatccttcacccagaagaacttccagatgccgttcagtgtcatgaaacgggacgattgttctttcaagccccgggtggcgacatcggccgactcgtaggcgaagtagttggtgtgcatgggggcacggttcacggcgttgacctcagggtcgagccattctttgaaagactgtgcgctggcagacaaggccaaggctgcaaacagtccggtaataagatgtttcttcatgatgattagtttaaaaatagtaataacagcatagggaatgctccgaatgctgttacaaaaataaggcgaatcgggctatttcaagaggagaatcggcccaaaaaggatgaatatttgctcacggaagcaattttccacggctcatgccccggaaaggggagggaaaactaactgtatgccatctccctccacctttcggaaagggatgtcaatgcaggcggtagacgctgaatgaacggggctgcagctccaagtcgagggattgcgcgccgacttgcaccgggcggatacggggaacgagagcttcttgttccaaggtattcaccgtacgccagtcacagttctgcagatacgtgcacgaaccgccgatgagttggcgtttcctcaaaccgttgaagttaacttgcacttgggccggggtactgcctgcgttgaccagcttcagaataatttctcccgtaggggcatcaagggaggccgtagcatagaggctgtcttgcccagccaccggcttgccgtccatctgcagacggagaacgtcggtaccggcattcattccatacatctgctggacgtaatagttcggggtgcgcatcatgcggaggttgtcgaaccagataaggtccggattccactgccaggcatccacatgggcaaagagcggggcgtaggtggcaaggtgcaccacgtcggcgttgcgctccagcccggtcatgaaggctgcttcggagagggcggcaaggaaattgttggtcttgcccgtggggtggtcgtgggaggcatactcgccggcaaagactttggggccgcggcggtcgtagctgtcatagcgggcggcattggcaaagaaccagtcgggggccatgtagtagtgctcgtccaccaggtccacaccgatgcgtttcatctcgggccagaggtagtcgaacttgtcaccatcggcgttggggccggaggagccaacaatcttgatgtcgggatagtgggcgcggatggctttggtaaagacttccagacgctcggtatagaccttatcccactgttcgttaccgatgccaatcattttgaggtggaacggctccggatgtcccatctcggcacgcagctttccccaggtggaagtagcagggtcattggcgaattcgataaggtcgagggcatcctgcacgtagaggtcgagctcgtcgaggggcaccacttcgttgctctcgtactggcaggagaggccgcaactgagaacgggaagcggttcggctccgagatcctcactcagcaggaagtattcgtagtagcccagacccagactttggaaatagtcggggaaagccttgtgcttgaaggtgtagttccagcggttctcattcagcggacggttctccaccgggcccacggagttcttccactggtagcgggtggcaagggtgttgccctcgatgatgcagccaccggggaagcggaagacgccggggttgaggtcatagagcgcttgggcgaggtcggcacgcagaccgttctctcggttcttccaggtcttgacggggaagagcgagatgtggtccatgtccaccgtaccctccgtcagcaacaccacgcgcagacgcgagtgggcatcggtgaagggggagcggaggaggacggtctgcttctgccagctgttgccgctgatttcgatttccttggtcaacagattctcgccgcgggagttcagcaactcaacggagagcttcatggggcgggcatcgggagtgcgggcataggcagtgaaacggtattcctcgccttgcttgaggccgatgccacggaaaccttcgttgtcgagcccggcacgcagccgacggccgtcgttgacgatgcgtacgtagtggggattgcggtcgaagcagggctcggcgtcctgcaccgtgacgttgccaaagggtacccagccaacgaagggctgcgggaactcgaaggagcggttcttcaccagttcagcgtagagtccgccgtcggcaccgaagttgatgtcttcgaagaagatgccgtacatcgtgggctgtatcttggctgtcggccgggatacgtcaacggtcattacatgttgtgcctgcgcacccaaggcgcaagacaataaaagggtggtaatcagttgtttcatataagtaatgtcaaatgttatagtaatacggaaacagtttacaaaaataataaaatctttagatacagatacatagtttattcctgcagttctgccgaagcggctcccacttctatcggcagccacacttccatccggccttcaccacgatgcgcccaagcataataaggaatcaacgtcaacttcacatccttcgcggcaaggcggcccgtggcgtcatagctcaaggcttgcgcacgggtggtaatttcgttgataccgcccagcaggtcggggtgctccaccacttggaacttcggatgccggttcagcagcagggtggagatatcgaaatcattgtccggccactcggcgcaatacaccagcggaccacactctatggccacacggccacggtcggcggcaaccttgtcattggccttcaccacacgcggctgcatatcaaaatgaatttccactacatctcctttcttccagcggcggtcgatgctgaggtaacccttctgcagtgctcccttcacctcctgaccgttgacagacacgcggtaggcaagctcctctccgtcggcatacgaatacaagccacccggtagcacacttccgcgtacccagcccggaatacggacattcatgacgaacggctggttgccctttgccactgtcaagcggatatcaccgttccagggataagaggtttcctgctccagcaccacattcttcccgttcaccttcagcttggcccggttggagaggaacagattgacatacaccttgtcatccttcaccgcatagacatagcccggcagcgaagggatgaagcggctgatgttgctggggcagcaggcgcaaccgaaccacggctggcgcgtaatcgtgtggtcggcattgaaacggtacttcccgtcgcaagccagcggattgggatagaagaaccgtccgccgtccagcgaaacaccggaaatcagaccgttgtagagcgtacgttccagcacgtcaaagtatttggcatcaccgtgcagcaggaacagacggtagttggtataaacattgccgatggcggcgcacgtctcgttataggccgtcaggttgggcagttcatagttgtcgccgaaggcttcaccctcatggcgcgcaccgatgccaccggtaatgtatatcttcttgcccacaatgttctcccaaatgcgatcgatggcacggacataagagctgtcgcccgtgatagcggccacgtcagccatgcccgagtacatgtagcctgcgcgcacggcatgtcccacagcctcatcctgctccagcacgggcttgtgcgactgcaaatagatatccttgcgcgccgtagtaccgcgtgcatcgaggaagaacttggcctggtcgaggtatttcttatcacccgtcaccatatagaggcgcaccaatgccatttcagcaatctggtgtccgggaatcacacgcttctgtccgggaccttcgccgatattcttgcatacacaatcggcataacggatggctatatccagaaaattccgcttgccagtagcttggtaataggccacagccccttccaccatgtgtcccagattatagaactcgtggctcagattctccacctccgaccagcgctccggccccgaccagttgtgcggatgtttcgggttcatcgtgcgggccgtatagaggtatccgtccggctcttgggcagcggcaacgatgacgagcacgctgtcgatatatttttccagtttcttgtccgggtaagtctgcaaggaatagcttgccccttcaatcgtcttatagacatccgtatcatcgaaggaaaagccctccaccttatattcgtcactgggatgagccgctttcacaaagttctcatagcgtcccgtctcctcgcatttgccgaaagccagcggaatggttacctcacggtttgccttcaagcgttgtccccagaaactgtcggtcaccttgaccgaagtgaaaggcaccgggtcgatgggataacccgaatgcaaagactgctgcttttgtgccgatgcattgccggctatggctgcaacaaatgccaatgtcaataattgcttcatatcttttaaggtattgagttattatgttttcaggcacggaattacacggattttttaatttcaacacagagccacaaaagcacagaatttctaatctctaatccttaatcctttatccttactttccctaatagtcctgattgtgaatcatccaacccgggtccacgtaatagtgttcgtctaccatgggcacacccagttcctcctccccacacggtgcggcgcgcatcgccattggcatactctatcagatccagcccccagggaccgaagtcggagttgacaaaggagttgccgtctgccacactgaaccatcggttgccatcgggactccaggctagtttcaaaccgccactgccgtcggcatgggagtaggaaaagaggtagactgaatcgggttcattcgccactccgttcatcacagcccacaaaggaacggtcagtgtcaagaacagacacaaggacaataatttcaagaatctattcatggtattaagtcggtattaatcatttacatttagttcgatagtcacaatcagccgtattctgaatgccattcagtcgtatagtgaatagggttcagtcgtatagtgaatgccattcagtatacggctgaattaggccaattatagacacttgataatcaaatatttaaaaaataagtaatccgtcataatatatcattacaaaacaagggttgctccatgccttctttatttcacgattaccgcccctccctgcggccgaaccgtgagttgcagagaaccatcagtctttatcttctgcagctttaattgaggctgcatcttcttgtcatcactatacagagatacctcttgtcctgccagcataagaaggtcaagtttcagtttcagaggttccgtcgttgcattgacagcggctatgtaccacgtgttgccatgacaacgggcaagaacaatatgtctccctggatagccgtcaatgaaacgggtctcgtcccaagtagtgggcacttgtttcataaagtcgaggcagatttgcggagcatccgtcaggttattgggcgccaaagcaaagttctgaatggggttttgtatagaaagtcttgccatcctcgcaacggaagatatgcgggtcgcggactcccccggtggagctgatgactttcgaatcgattaccggttcattatcatttaatgcccagtaggtataaccgtccatgcttacagcatagcggacagcttcttcatcgccactattcccagtgaaataagctacataatctttttggggaaaggatttttgccaggaatatcccggaagtgcaaacaacgacaatagcattgccgccaaaagcatccggaaagtgtttttcatccgtacaatcataatctttttatattaaaccttttaacgggtgtaaaattaacactatatacattataatacaaagaaagtgtatatgttgtgtaacatatacacttatttactctctcaaatcagtcggcattcaaaaaacgcaccatctcacaagctgccagcagaaatacccctaccccaaagttagcagtagagtgggcatcaaccacttgtccgtgaatggctttctcgccaatcggctgtacataccctatgcgaccatcgggctgcaaggctacagtagtcagataattccacgcctttttctaggtccatgcctgcggagcatctgtccagaacggatggtcagcggacaagcccaggggcaaggcacctacataccactcttccaccttgcgcagagcggagacaatacggtaagcctcactcttagcctcagccttgcgcaggaagcattctaccgtagacgagaacagcagccagttggtataaggagggttcacacggcgcaaccgggtgaactcttcaatgtaacgccgtttagtcaaactatccagaggcacccacaaagcatcgtatcctcgcaggaagctttcagcaatataagcggcatcgaccagcagctgcccctctttccaccaaagcaggtaatcctggctttcagggtctaccgcctgcgcataacttttcaatgcccactcgcgaagttgcctgcgctgtttgccttcggcagtgtcatcgtccggcaaagagaaccagggcgccaaccccgccatcaaacggccgaagcattccatataggtcacccgtttgtcgcgtccatcccaagtggggctaagctccacctgcatattttcctagagcttcccttcactcatattgctcagtccggagcagccatttgatacaacaccccgacccaaagttcgcggtctgtcacttccttctcttttttcttcttggcagccatttcctgaacgggcagcaataaaactgccaccagcagcagccataagtagttactttttctcatgatattatttaagtttgtttttcaatactgcaaattaccccatccccggtaatttcgggggcactattgtttcaaaaaggggtaaatatcggtcattagtgccccagaaactcagaaatcacaagaaaaaagcccaagattaaatcattccacgacggaaatgactaaagtatttaccgttatatttgtttctgcatgaactgcaccagtacaaaggcaatacaataagctataatctgttcaaaccaaaagtcaagtccttcaaacatattacccattattttaatagacacctattcctttttctgataacaaagaaaaggaatttattcggaataatgaatttccatacgactcaaaaaatgttctatttttccggattacagacaaaactgagaatacacaccaagacactgactccttccatattacattaaatgtcccgaaaaccgatatattctcctgccaaaagactatttttgcaataaatatccataagcataccatggcaggcatctatattcatatacctttttgcaagacacgctgtatctattgcgatttctattccaccactcgcagcgaattgaagctgcagtacatccatgccttgtgcactgaactgaaaacccgcaagggttatctgaaggaagaaccgatagagaccatctactttggcggaggaactccctcacagctcgcccacgaagatttcgagcagatattccggactatcaaagaggtgtatggaacagaacatgccgaagaaattaccctcgaggccaatcccgacgacctgacggaagaatatgtgtccatgctgcgtaccctccccttcaaccgcataagcatgggaatacagacattcgacgaccccaccctgaaactgttgaaccgccggcataatgccacgcaagccatcgcagccgtacaccgcctccgccaagccggcttccggaatatcagcatcgaccttatctatggactgccggatgaaacagaccaacggtgggaatgcgacctgcaacaagccgtcggccttgatgtggagcatatctccgcttatcatctgacttacgaaaaaggcacccgcatctacgaaatgctgcaaagccaccgcatcagcgaagtagatgaagagagtagcctgcgcttcttctcggcgctcatggacaccctgggagccgcggggtatgagcattatgaaatatccaacttctgcaagcccggcatgtactcacgccacaacaccgcttactggaaaggcattccgtatttgggctgcggcccttccgcccactccttcaatgcggagacaagggaatggaacacagcttctctggaaagatacataaagtccattgaagagggacagcgttcctccgaaacagaaatcctggataaagtgacccgttacaatgaatacatcatgacttccctgcgtaccatgtggggagtctccctgacatatacggaagaagccttcggcacggaattatgccaatattgcatgaaaatagcggctccatacctccaaagccacaaactggagatgcaggcagaccgcctgcgcctgacccgggaaggcatctttgtttcggacggcataataagcgacctgatgttcattgattaacagcaaaaccgggagactgcatgaccgaacaagaagtcagacgctacttgcgccaaatgaaggaagaagactcggaacgggcttttcacagtttctacaatctgtgctacgaccgtttgttccgtattgcctgctatttcgtgaagtatgaagagtgggcgcaagaaattgtgctcgacgtcttcatgaagctttgggaacaacgcgcccggttgccggaagtgaacaacatagaggattactgctttatccttaccaaaaacgcctccctcaattacctggaaaaagagaaccggcaccctacactttcgtccgaacagcttcccgaactttcagaccaagccgattcccccgaagacactcttatcagcgaagaactgtttgcccgatatgtcaaggcgctcgaccgcctgccggagcgttgccgtgaagtattcatccgcctgcgcgaagagaaacaaagctatgcacaagtggcggaggagctgaacatcagcactaagacagtagacgcgcaactgcaaaaagcactcacaagactcaaggaagcattgctgacggagtgaactctgctttatcttcctcgcaagaagccgcgtatgtatgtatgagatgcacatctcatgcagactttccctattgattgaaacagagaagcaaggaagtcacacgtaagcaggacggactttcacggacaaagagctttagattaacattatttcaggatataggcatagggaattcctgaaaagcagctgtctttacatgcaggaaaggagtcataggctcttaataaattgccaaaaatgaaagtgaataacgagaatttcgacaaggtactgaacaaactggttgcttctacccgttccccacgaggacgctttacggcagaaaacagctggaagctgctggaaagccgtttgttaaagcgccgcagcatgaagcggttctggatgcgtacagccagtgccgcagccgtagtcctgctctgtgtaacgagctgggcagcctatcagttcttatacgtagcaccgcaacgggaagccattcccacagaagccgtacatactaccgaggaaacccaagtaatccatagcgtactgacattcgatcagcaacccttgcaggaaatcgtccgtcaactttccgaaacgttccgtaccgatatacgtatcgaaggagacagcctgaagaactatcacatgacagctaccttccgcgaaggggagagtcttacagaaatcctcgacctactgaaggaagccggtaactttacctataaaaaagaaaacaacaccattatccttactactaaacttaactgacaatgaccagctctactatctgttcgcaccaccgcatcagaaccgtacttctgatgtgtgtggttcttttaagctcctcactccatgcaccagcacaaaacaaggaaacacgtataaacctgaatatccgtaacgcaactttagagagtttcgtgaagcaactggaaaatgcaaccggattctccttcatctatggggaagaagtaaagctcacgcaccgcatcacactggagatgaaacaaaagaacatcagtgagatattgcaacgtgcctttgaaaacgaacccatcacgttcgaaatatccggaaagcacattctactccataagcggcccgtgccgcagaaacccgttagccgtaagttcaccatcagcggatacgtgaccgacggagcgtcttccgagacgctgattggtgccaatatccttgagagtcgtcgttccacaggtactgccaccaatcctttcggtttctattccctcaccttgccggaaggggaaacggaactggttttctcctacctgggctacgaaagccggcatagccggttcgagctgacgaaagacaccttgctcaacgtcagattggacagtaataaccagctggcagaggtcgtagtgctctcggacaagcgggaggccggcatagaaagcacagccatgggagcgcatgagataccgatgacacaaatcaggcataccccgtccatattgggagaagccgacctgctgaagaccattcagctgatgccgggtgtgcaagccggcatggaaggttttgctggcatgtatgtgcgagggggaggtcccgaccaaaacctggttatgctggacggaattccagtttacaacgcagaccacctgttgggagtattctccatctttacgcccgaagcggtaaagaacaccacactcttcaaaagttcttttcctgcccgctacggcgggcgtctttcgtctatagtagatgtacggaccaacgacggagacatgcataaataccacggcgcattcagcataggcctgttgacggacaaactgcatatcgaaggccctatctggaaagaacggacctccttcagtttcagcgcacgagccatccccaccctattcttcaaaaatctcattgtagacaaagacgacacctattccgacaaatacaactactatttttacgacgtcaatgcaaaggtcaaccataaattcagcgaccgtagccgcatcttcctcagtttctacaaggggaaggaccactatcattatgacagttactaccacggtgacaattacgacaacagcattaagaattattccaaggacaacagccatctgaattggggaaacaccatcgcctacggccgctggaactatgtattcaacagcaagctgttttgcaacaccaccgtctcatacaacaaatatgagatggggctggacggaaacatagaagatacctatactgtcgccaataaagtacaagacagatactattactcctccaagttcaactccggtatccgtgactggagtgcgcgtatggactttgactacacccccatgccgcagcaccacatcaagttcggtgcagagtacatccaccatacgttccgtccgggaatagctacctcgaaaatacaagatatagataatggcgccctccaggaagatacggtttacaataccagcaacagccatgccatgcgcggacaagaaatctccctttacgccgaagacaatttcaatgtaaacgccaggctcagtctgaatgcaggtgtacgcacatcgctgttccacacacaagggaaaagctactattcgttgcagccccgcctttccgcccgctatgacctcggacaaggatattctgccaaagcatcctatacgtgcatggcacagtatgtgcatctgctgtcctctactccgctgtctatgcctaccgacctctgggtacccattaccaaagacatcagtccgatgtatgccaaccagttctccataggaggctactattccggactgccgggttgggagttctccgtcgagggatattataaacagatgaaacacatacttgaatatcaagacggtgtatccttcttcggcacctctaccaactgggaggaaaaagtagaaatgggcgaaggccgctccttcggtctggaactgatggcacagaaaacattgggtaagactaccggctggctcgcatataccctatccaagaccgatcaccgttttaagaacggtaccatcaaccaaggccgatggttcccctacaaatatgaccgccgccacagcatcagcctcaatctcagccataagttcagtgaccgcattgatgcaggagcttcctggatattcaataccggtggatgtatcactatccccgaaaaggcaacaatcatcatcaaacccgatggctctattgaggaaaccggctacatctcccggcgtaacaattaccgccttcccgccagccatcgtttgaatctcggcgtcaacttcaacaagaagaccaaacatggtattcgtacctggaatatcagtatctacaatgcatacaatgccatgaatccgaatatcgtttacagcaaatatcaaaatagatacaacgtatactacgatgatttctacgaaagtatttatcatggaaataccggacagaagaaagctcaaactgtcatcaagaaaataacaatactgccttgtattccttctgttacctatacttatagattttaaaaacaaatccggcatatgaaaacaaaaatgaaattacaccttattatatatataactattgtaagcttcctaacagcctgcgaaaacgaaattccttacaatcccggacaacaagatccgcaaatcatcatgaacgccttgctcgaaaccggacaagctgagaatgatgtctatctccacttaggcgagggctatagcattgaacatttgaacgaagcaactctttccctctacatcaatggcaaaatagcagaaactccgaaagcggtttccccggaagaaatttatgggcatctggaaggagaacttgataaggacatttatgaatcattactgaaaagtatacgcttcaagaaatatcgtctgaccagcacactacatcccggcgacaacatacgtctggaagccactgccgaaaacgggaaataccatgccagtgccgaggtcaccgtgccacaaccgatagagagcctgcacgtggatacttgcctggcctacctgcgcgagtacagcgggaaaaacctttaccgccaatacaaaattacattgcaagaccgccccaacgagaagaactactaccggctggacatttggaatgaccgtagttactattgcaaatggaaagaatatctggaggatgaaaacggcagcctcatcaaagtggaagacgaggacggctcttggcattgggcctccatacctagagacactaccatccttgctccccggcagaacgaaatcatcaaccgggaagatgttatactgactgacggccaccccagcaactatgatgatgaagaaaatgaattgtttcccaccataaataacaaatacaacatattcaatgataacactttccgtaactcttatgccacattgaaagtatacacccctctctaccaagattattatccgatagagggacactactacgaccatatatcccgcaaacaaaccatcaccgtacggttgcttagcatcactgaagccgaataccgctatctaaaagccttaaactgcctggatgatggggattacgacgatgctttaatggaacctatcagtctgccttgcaacgtcataggcggattaggctttgtgggagtctgctctgaaagcagagtaatcatagaattacccgaaactatttggcaataacattttgactaataaaaatccttttatccattactacaaatataaattcagttagtccacattacattcgtattacaaaaagcatctaaacaaagcattttcacactataaaattgatttaagtcaagaaatgaaggtataaactacactttttcccttattcatttttgtgttataaaacatatatctacatttgcataggtaaaagaaaaagctaagcgcttagagagttttcaataggtattagattgaaattagtttttaggaataacaattaaaaagtaggtattatgaaacgtttaggattaacattagtggcagcagtctgcctgactgctacaacatttgcagcagaaaaccagcctacaactgcaaaatgggaaggtaacatcaacataacaaagttgagcaagtatttgaatctggattccaaccagcatgaagaagtggcaaacatctgcgaatattttacagaacagatggaacgcgctacaaattccaagaagaatcaggagaagttactccgtaatgcagtttatggtaatctgaagttgatgaaaaagactctgaatgaaaagcagtatgccgattatgccagagtattaaatgtcacactgcagaacaaaggtatcgaagtgaaataagcttcgcttctgatgaatacgaaaattgtatttgataaataaaaaggcattggactttaaaggttcaatgccttttctttacgtcaacgccaccaaagtctgcggcgtcaactccctaaccaaataattcttatcactttacaagcagaatctgtcttgcagttctttcttatactttctggaaaccagcagttccgtcactttgtcaaatggtggataaagcatacatttgctatcctttataatcatcagataatcaatattgataatatacgattgatgtatctgcacgaaactggatgaatattgagtaatctgctcagcagtcattccgcgacgcagcaccaatggcggctggttgtttagtatcacctcccactgtttacgctcggagcaatagcgaaaaaaaccgatttcagccggacgcaatgcacgcatatcattggttggcgtaaatacgataaatgtctgtccggtatgcaacggcgcaccaatgggatatgacattctctgcccagcttctgcctgctctacaaaacgtgcaagaatatcccgaaactcctgctcttcaaaaggtttcaacagatagtcgaacgcagcctcccggatagcctgaaccatatacttatcataagccgtatagaaaacaatccgcatgttccatgaaacactgccacgtatttcctgcagtagttccattcctgtcatatccggcatttccacatccaagaacaacaaatccggctgtaccttggcaatgagttttttcccttgcttgccattacgggcagttcccttcaaagaaaagcgtgcatcctttcccaattcaaaactcagattctcaagagccacctcatcgtcgtcaactattgcaaccttatatttatccatgtttcttttatgtttttcttttcgcgaatatatacataatcctgctcccatacaaagcaacaagaagctatttacggactatttatccgtaaatatgcctatccttgcaaaaaacgagattaaacggttcttttaaatcctgtaatcgtagttgtctggcaaccagaaagtcacctcacatcccatctcaccactctgtagagagacattgtgcactgaaacatcaatggcctccttattcttattgttgagaatctgaatggtctgcataatgactttcattcccgtccccgtgccccggttccgactgtctggacgataaccgccaccattatccgttatctttatacagataccgtttccccggcgacagaccgaaacccaaagattacgttcaccttccttctcgcgcaacgcatgcttcactgcattttcaaccggaatttgaatcatcatagacggaatccttatttgctccggctgcacatccttttctatcttcagttccgaatgaaaatccggacctaaagaacggcgttccagattaatatatgttttcacaaaatccagctcctctgccaaggttacacacagttgttccgccaattccagattgcgacgcatcagttttaccagcgacgaaagctcttgcttttcttctacattccgctccgccatctcccagttcagcacattgaagatgaaatgaggggacaagcggttacggatattctccagacgaagtgtagagactgtgcgatgattccgtgcaagcaacaaagcacgtttctttttgctgtacagataaagaaaaaccgccgtcaatatagatacaacagctacagcaaacacgacaaactgtgtctgcctcagcaccagcacctcgtttttctgctcctgaagcaaaacccgatgtgccatcaaggtagaatcctgctgataacgcaaagtcaagtctgccgtacgcatccggacacgctcattcctgatagaatcatcaagcaggttgttcctctgcagatagtgataagccctcttgtagttgccggtttcctcgtaaaactgctgaaggtatttattacggatatgtaccatatcagggtcgatgcccggaggaactacactctcggacaataaacggcgtgcttcttgaaagtctttctgaagcagggctaattctattttctgcgtatcgatataatatagtgcagtactcacccccatttcctcaaaaaaaggttggcattcatttatatatttaacagccaaatcaaccatattcagttgaagataacagtctcctaaattcaacctccccagattaagttcaaaactcatatcatcatatccttcgactaaatcaataaccttttggaaatattttatcgctgtctggtaatcctccctataatagtaagaagtccctctattattcaaataaatatatttttcataaggcagcatattgtcatagctttcccctgcaagattgtaatagtaatcacactgttcaaaatcacgcatggtaacatatacttgtgccaaaccataataaatgggaggtttcttggtagaagccatatgcaaagagtcgcacatcaacaaagctctcctataccaagctgcccctatatccaattttcctaaacggttattcgcatcagcaagattcatcaaaatatccggcaccacttcaatcctagtccctctcatccgtaattcataagccttccggaagcaaatttcggcagaatccatattcccaacgcgtgcaaagatatttcccttcatattgaaacattcagactccaaatctgccatttgagaagaactatgctgcctttcaataaagtcatgtatctgctggattacgatttgcgccgaatcaagctgtgaagtaatcaaatatgttttcagtgtcattgccagataattatatttgaccaagctatcctttgcctcttccatcttttgaagagccttcaacctcacctttcggggcacaatggccacagagtctccatttatacgggaaaaatcctcaaaagctctcatctctgtgtatacgtcctcttcatctccgggcgcacaagcccctagaaacacaagccctaatatccaataaatgtaaaatcgaattcgcttatccatcctctctcccatgtttcccgtaattagattatttattcaatacatctacaaacttaaaatatttttgcgaaatgccgtcaagtataaggcgtatttctcagccataaaagagcatacgttaccgctttattaaaacgaaacaaaaaatcacatcatagtacaatatttagctaataagccatcaaaaataatgaatagggcattccaacgtttgaactgccctattcactattcaaatacttgattttatttaatcgtcaccatcgtcgccccaaatccgtactcctggaacgaagcatcctggtggcggcaattggaatatttacgtttcaactcatccaatagcgctttacgaagtacaccatcccccttgccatgaataaagacgatgcgttgttcgcgctttttcttgtattgttccatcacttcacgaaacttgtccagttggtaattcaatatttcactgttgctcatgccgcaggtgtcatccagcaactcgccgatatgcaggtcaatctcgacaatcccattcttgcccccacgtttgatgaccgtctgcggtttggatggagtatctgccgtttttttctgtatcaaagcctccttcagttcctctgccgaaacatacacctgcttggcaggctggtcattccggacaatatcatacaccaaggccggtgtttcaaagaaaaccgtctgctggaatgtatgcagtttatagaactttaccatatctatgcggacttccacactgacagccgatttcattgtgaacgcacggttatctttgaatgccaccagctgtaccatcacacgttcacggtcgttcaactcggacttttcgaactcctccagcagaagtttcgtattcggctctatcaaaccatgcgaacggactgtccaggactttccttcagcactcgaataggtataatacatataataattactgtcgttcaccaaatatgcctcgaaaggtgtagtgctgacagccttgatatcctccggaacaaaagccagaaaaacattcaggatatctccgcctttcatctcgggctgacgataaacagatatctgcggtttctccaaacggaccgtttgaggctctgaaacctgagactccatagcagacggccttgccgcagtagcagtcgtacgcaattgttgctcttcttcccgcttcttcttggcagccgctttggctgccggagtggggatattataatcatcggtctctatcaccacacattcgtttatgggcatcggtatgtcaaaaccgtcggcatcttccaccaacacgatgtttttcccttgaaatcctgtcacaacaccacccccaacttcgctgaggaaacgaactttatctcctatcttcatagtaacgtatcttttagtttgtcttttcctactttcttcctgcaaagttaggaattatttcccttattcttcaaatcttcccaaatatccgtacctttgcagccgatataataaagagaaagccatcatgaaagaagaccccagacatatcagaatcagcgaattcaactacccattgccggacgaacgcattgcaaagttcccattgtccgtacgtgaccagtccaaactgttattgtatcgccacggagaagtttcagaagacagattcacttcactgccggagtatctgccatcgggaagcctgatgatattcaacaataccaaagtcatccaagcacgcctgcatttccggaaagaaacgggagcactgattgaagtattctgcctagaacctatacagccgaacgactatgccctcaacttccagcaaaccgagcataccgcttggctctgcatggtcggcaacctgaaaaaatggaaagaaggcatgctaagacgtgagatgaccgtgaaaggcaaaccactcaccctgaccgccgaacggggcgaatgccacggaaccagccattgggtaaacttccgctggaataatccggaagtgacttttgccgacattctcgaggtcttcggtgaattgcccatccctccctacttgaaccgggaaacccaggaaagtgacaaggagacttaccagactgtctattccaaaatcaaaggttcggtggctgcccctacagcgggactgcatttcaccccacgcgtattggacgcattgcgcaataaaggagtagaattggaagaactgacactccatgtgggagccggaaccttcaaaccggtgaaaagtgaagaaatagaagggcatgaaatgcatacggaatacatctccgtctcgcgcaacacattggaaaaactcatagcgcacgacggcaaggcagtggccgtagggacaacttcggtgcgcacattggaaagcctttatcacatcggagccaccttactgaataatcccgaagccacggaggaagacttgcacgtccaccaatggcaaccttatgaaatgtctgccaaggctgccaccacccctgcagtaaaagccctgcaagccattgtcgcctatcttgacaagcatagtatggagactctgcataccagcactcaaatcatcatcgccccgggatatgaatacaaaatcgtgaaggctatggtgactaatttccaccaaccgcaaagcaccttgctgctgctcgtatcagctttcgtacacggcgactggcagaagatttataactatgcactggcacatgatttccgctttctgagctatggagattcatcattattaataccctaaacacaatgaaccacgataacaatcaagagatgttcccccttgtcgacgaacaaggcaacatcataggtgccgccacccgtggcgaatgccataacggtagcaaactgctgcatccggtaatccatcttcatgtattcaattccaaaggtgagctgtatctgcagaaacgtcccgaatggaaagacatacaaccggggaagtgggacacctccgtaggcggacacgtcgatttaggtgaaagtgtagagatggcgctgaaacgcgaggtacgcgaagaactcggcattaccgactttgttcccgaaaccgtcttgcattatgtcttcgagtctgcccgcgaaaaggaactggtcttcgtacacaaaacggtctacgacggtgaaatacatcccagtgacgagctggacggaggacgtttctggagcattgatgaaatcaaaaaaagcataggcaaggaagtctttactccaaactttgaagaagagatagagaaagtcatcgaattgtagcagcaataaatactccctaaaaaaagtcccactctccaaaagaaaagtgggacatataacagtcattacaatcagtcttattttgccaggtcttcaatcaccttcataatctgctgaccgatttcctcggcagcttctggtgtaccggcctcactataaacgcggataatcggttccgtattgcttttacgcagatgaacccatttgtcggggaagtcaatcttcacaccgtctatatcattgatttcttcattcttatacagctccttcaccttggcaagaatagcatctacatctgtttcaggagtcaagtctacacgattctttgccatgaagtatgcaggataggatgcacggagttcgctcaccttcttgccttcgtgtgccagatggctcaagaacaaggcaatacctaccaaggcatcacgtccatagtggctggccggataaattaccccaccgtttccttcgccaccgataacggcacctacctccttcattttggtagttacattcacttcacctacggcggaagcgtaatatccttgcccatacttgcgagttacatcgcgcaaggcacgggtcgaactcaaattggataccgtattgcccggagtatgtttcaatacgtagtcggcaacagtaaccagtgtatattcttcaccgtacatcttgccgtcttcgcaaatcattgccaggcggtctacatcagggtctacaacaaatgcaacatctgccttccctcctttcatcaggttcatgatgtcacccaagttcttttccagaggctcgggattatgctggaagttaccggtcggttcgcaatagagcttctctacgtgctgaacacctagttgttcaagtagttgcggcagaataataccacctacagagtttacacaatcgatggctacacggaagtttgcctttcggatagcttccacgtctacaaggtcaagcgccaatacgctgtcgatatgtttctggttgtagcttaaatcctgacggtacgagccgagttggtccacttcggcataatcgaattcttcggcagctgcaatgcggagtacttcctgaccttcggcagcgttcagaaattcgcccttttcattcaacagtttcaacgcattccactgcttgggattgtgtgaggcagtcaggataatacctccactggcaccttccatggttacagccagctcggtagtcggagtagaagccaaatcaatgtccactacatcccagcccatacccatcaaggtaccgactactacgttcttgaccatctcgccagagatgcgggcatcacgccctaccacgattttgttactttttacagtacacgtcttacgaatcagggtagcataagctgaagtgaacttcacaatgtcgagcggattcaatccctcgccggcaccaccgccaatggttccgcggattccagaaatagatttgattagagtcataggttaatgatttaaaatttataggttagttccaaatttggaatttatgtatatcgtaataataaggatacacttgttgcatggcagtctgttgccccatcttagatggtacaatcagtttcacatgcgccccatcacgtacataattcaaagcgaccaaccaaccggcaggcacggacgatccataatatgcaagcatatatccttgtgtaaaaagtccggctatagatgaagaagtaaccgtatatctgaattcatccacaactgtcggattattcaaattagatgaagtcaccgccttttctatcaatccatattcttcataacgcaccaaaaccaaatcattcggtttaactgtatctgcaggattcgtcgaacctttatccacaatctgcatatacaccccgcttgccagctgcacatactcattcctgcttacatccgttgtcgaatcttgcgcatagaattcactttgagaaataacgacaatactactgtctttgataaacgctttgatggcatctttttcttcctcaagcatttcggcataagttttagaattatcgcatgcctggaaggctaaacaaactgcaagtaaggcaaaaaagaataaagtaagtttcttcatttctgttatttagtaatttcgtacaaaagtatctgatttccttgaaagttgaaagctgcggatagaaagttcgtaacttttaacctttacaactgaactttttttatcctttggcattcagcagcggtttgtatttctccaaagcctgctcaaagaccttgcgggcctcatccatcgttccataaaattcaccgccggaagcattcaaatgaccaccgccgccaaagaactcggcagccagctgattgcaagggaacgtaccgaccgaacgtaaagaaatctttatcatcggcttctccgtatcttcacgcaggaaacaagagaaaatcacccctttgatgctcaaaggaatgttcacaaacccttcactatctccacgcacatagtcaaattggctttgttcggctttagtcaaggaaattaaggctgcatgatagtccggatagaccttcatttgtgacaagacatatcccatcaggcgcagacggctttctgaataagtattgaacactctgcggtaaatctcgtccttatcaatacctttcgacaacagttcgctgatgatgaaatagatttcccgattattggaattataggtgaacccgccggtatcggtcatcatgcccgtatagatacattccgcaccttcccttgaaatgtcactgaaatagcccatacggcaaatcaggcggaaaaccagttccgaagtggaagatatctccggatgggagatgataatcttgcagaaatcctctggatggagatgatggtctatcagtatttttcttgccggggatgcaagaacagcgtcacccatggcatctatacgatggatagcattaaaatccagacaacaaatgacatccgcctcggcaatcagcttgtcggcaaactccttgtagcggtcgtacagaaggatgtccttgctcccgggcatccatttcaagaagtcggggaaagcgttcggcacaataacattcgccgtctttccctgcgaactgaagaagtgccacaagcccagagaagagccgatggcgtccccgtcgggacctacatgtgaaacgattactatcttgtctgcacggtcaaaccatttggtgaaatggtctatcttggattgttctattactttggtcaacatatttttatttactatttgacgattgactatttactatttggcgtttataacaaattgaaggggcaaaagtacgaaaagtttgtgatttataacaatatgcggtaagaacctttttgagaaagaagaagatagggaatacctaagcgaacgcaattattggcaatcttattctgataatagtctgaaagagaagcgtcaagtaccaccatccctatggaaaagagcgaagtaagttcctctatcccaccttgataccccttggagacatacagataatcaactaaaaggggacgggaagagttcttgtttctccaacggttgtcggaaagaagacagatgcacttaccggcataagagacaatctggttgcgcatggataagccgggagttatataatctccggtaaccagtcggggagtctccagatgcaggcggttccaatgcggagaaagggcacggcacaaacgcggcatatccggcaagctatcggtacatgccaaccaagaatgacggttgtctgccatacaatggacaacgggacaacctctcacgctataaaaagcaatcccctgccggggagcattggacatgatggaaagggaatgccaggaaaccactgccaacaatgccagcaacgcaaagcagactctacgtaccgtaaggcgtagaaagccataatatgccatccccaagaacagatagacgagcagaacgccccatatatccaaccaaatattatcgacagcagcgccgggaagatgctctatccagcgaagcacttcattctggacatgtaccaatgcctctactacccttgcaaacagatgttgtacaaaaggcagcggcgtaagcatcaacagaaagaccgccgaatacagaacgagtgacaccatgggaattacccaaagattagtcaacagaaaatgagtggaaaaacgggagaaatagacaatgaccaaaggggccgtacccagctgagctgccacagacactgtcataagtccccacaaatatcgcaggaaacaattgtcaaccttccaaagggcatacaacttaggctgtacaagtacaatagctgtaaccgccgagaatgacaactgaaaaccgacatcaaacaaccaggccggcttgcacagcagcatcaggaaagcagttgccgccagcgtattcagagtcagcggcttttccggctgcaaaccggcaaacgccaacaaagagaacatgacaaccgaccgcaccaccgaggaggacaatcccgtgaaaaaagcaaaactcaccaagaaaaggaccagaagcaaaagcaacaaaggtttcaaccgccgccatcgcctccacaaaggacgaagcacaaacaagagcaaagcatacagaaaacctatgtgcaaccccgaaagtgccagtacatggctggctcccgaaacggagtaggtctccacaatatcatcactcagttcctctttatcccccaccgtcaacgcagaaagcactgccaattcatcagcttcaaagcccaaactccggtataagccaaccactttcgccctataatccagtgccacctggctgacagtgcgagaggcattatgccccgtcttccgccaatgtccgtcagccacgtaggccgtgccgctatagcctttccgcctcaggtagcgagcatagtcaaactcgtcgggattatcattgtttgccggaggaacaagccgggtagataccagcaactcatcaccactgcgcaaagtggccgtagcagaatctttcggaaaataagccagaaaaagatgattccgggggcaacccgtaactgcatcctgctctacctctcccagcaggacaaccttgcacaatatgctgcgctccctctcttcgggatgctcgcggatacaaaccctataaacagcaggtttgcccgaaaagggaaatgccgtctttccctgctgccaactcatcaagcagagccccgtaccacccaagaaaaggtataccgccgctccatacacccatccggtatgcttgtatctgcctatgataaaaagaaaaagcagaaaacctgccacatactcccatgcagaaagcacgtgtggaaacgcatctccacacaaaataccaactaccaacggcatcaacagtcgaaggaaaggatgccgttgccagctgtcgattatcaatccagaagacggattacagattccttaatgcacggatggcctccttcggatcgggagctgagaaaacggcattgcctgccaccagtacatctgctccagcttctaccagacgcgaaccggtttccaagtttacgccaccatccacttctatcaaggcctgcgaaccagtaaccgtaatcaattcacgcaactcgcgcactttatcaagagaatgctctatgaacttttgtccgccgaagccaggatttacgctcatgatcagcaccatgtatacatcattaataatatccttcaacaaggacacgggagttgccggattaatcgttactgccggctgcatccctgcttcgcgaatttgctgcaccacgcggtgcagatgcggacaagcctcataatgcacattcatgacatgggctcccagagccttcacctccggaataaacttctccggctgtacaatcatcagatgcacatccaaaggtttctgcgacagttttgccacatacttcagtaccgggaatccgaaagaaatattggggacaaacacaccgtccatgatgtcgatatgtacccactctgcctcactttcgttaatcatttcaatgtcccgtgccagataaccgaaatcggcagagagaatagaaggggatatgattggtttcataatgctgtattctaaagtttacgaactttgtgatgtacaaatatagataaaagatttaagtcggcctaacattggaagtcaaaactctcactgcaaacttactgcataccttttgcagcgtcactgcaaacgtgttgcagtgctactgcaaagcagttgcagtcacactgcatattagttgcagcaacactgcaaagcggtttgcagtgacgctgcaaaacaaatgcagtagttttgcagtaggaagttgatgaatgacaatcagttatttcatcacacattcttccgtcaaccggaagccgcgcagcagttcatccgtcttcagtctcttcttgcccggaagctggagggagcggatgccgacaaagccatcttcggcagcaacgcggatatagtttttcccgtctgtctgcaaggttccgggagccagttgatgggattcccctatcttctccgtctcgaagatttttactacaatagattctccactggactggaccaactccgtccaagcggcaggatagggagaaaggccgcgtacaaaatcgtaaatacgcttcaccggacggttccagtcaatacgacaagtatctttgaagattttcggtgccggacgcagttcacccactacggccatttcttcttgaggaatacttttcaccgtaccggcaagaatggcatcaacagtctctaccaccaggcgaccgcccaacagcatcagtttgtcgtgaacgatacccacattgtccgtatcggcaatgggtatccgtacctgctgaataacctcaccggtatcaatctcatgtttcaggaagaaagtggtgatgcccgtttccgtatcaccattaatcaccgcccagttgatgggggctgcgccgcgatactgcggaagcagggaagcatgcaggttgaaggtgcccaatcgcggcatgttccatactacctccggcaacatgcggaaagcaacgactatctgcaaatcggccttccatgcacgcaacgcctccacaaaaacctcatccttcaacttctccggctgaagaagcggaagattatgttccagtgcatactgtttcaccggagagaattggagcttatgcccccgtccggcaggcttgtccggcatcgtaatgacacccaccacattgtaacctccttctaccagacaacgaagagcctccaccgcaaaatcgggagtacccatatatacaatcctcaaattcttcttttccaccatttcatttacaatttactccatttactatttaccatgtacaatgtacacagcactccgaatggcaaattgtacattgtaaatggtaaattgtacatgtcctcagtcctctgaaaaatgtaccaacacttcacgatacgagttgaatatcttcgacttggacacgaatcccaagtatttgttttccgcatccaccaccggcagattccacgccttcgtatcatcaaaggtacgcatcacctgctccatactgtccgtatcatacagacgtgccggagccgaagtcatcagttttcccactgtaaagcgatgatataactcctgacggaacataatgttccggatatcgtccaacaaaacaatgccaatcagtactccttccttatcggccacgggaaagacattacgatgcgaagcagaaatggcctttaccagttcacccaaatccatttcgggatgcacggtcacaaaatccttttccaccacattctccatcttcatcagggtaaggatggccttgtccttatggtgcgtcagcaactctcctttctttgccaaacgcatggagtaaatactgtgaggttcgaacatgataatggtaagataggagctgacggaaacaatcatcagcggcaggaacaagtcgtatcctcccgtaagttcggcaatgagaaacacgccggtcagcggagcatgcatgaccccactcataacccccgccattcccagtaaggcaaaattcttttcgggcagataagccgtcatctctatttcattgctgaaatgtgaaaagacaaaaccggcaatacaccccaaatacaatgaaggtgcgaagataccgccgcaaccgccaccgccattcgtggcactcgaggcaaaaaccttgaacagaataatcagtatgaggtatatcagcaacagatttccgtgcccgtagaagaaggaattattcatcaccgtgtcccattcggcattactcactccattcagcaataattctatcgtatcgtaaccttcgccatacaacggtgggaaaaggaatatcaggatactcagcatggcaccgcccattatcagcttcttatagggagttctcaaccttccgaacacgccttccacagagttcatggcgcgggtgaaataaagggaaaccaatccacagaagatgcccaacataatgacatacggaatacgctccaattcgaaagcttggtccagatggaatttgaacatggcgtccgtacccgtcacgatataggaaacagttgcagccgtcaccgcagatatcagcaacggcaacaaggaagacattgtcaaatctatcatcagtacctccagcgtaaataccagaccggcaattggtgccttgaaaatgcctgcaaccgcaccagcagcaccacatcccaccaacagcatcagcgtacgatgctccatcttgaatatatttcccagattagaaccgatagccgaacccgtcaacacaataggcgcctccgccccgaccgaaccaccgaaaccgatggtaatggaactggctatgatggacgaccaagtgttatgtcgtttgatacgtccctgtcgccgcgagatggcatacaagattttcgtaacaccatgactgatgtcgtccttcaccacgtaacggacaaacaatccggtcaggaagatacccactaccggataaaccagataaagatagttggcctccgtcgcattgaaattgtccgtcaggaagttctgtatccagtgtatgatgcctttcagtatcagtgcggcgaacgccgtaaaaatacccacaagaaaactgagaatcagtatgaattgcttctccttgatattcttttcgcgccaaatgatgaagcgctgcaacaaactcctcttatcctctgccattttttccttttattcgcgaataatcttgatgactccgcccttgcccaacttaatgatgctggacggtttcgggcgtcccgtttcctcttggcggtatcctactatataatctaccgcagacttgatgtcttcacttatttcactgaagttgccgggagacggttgcccgctgacattggcagaagtagagactatcgccttacggaactgctggcaaagccgctttgaaaatgcctcactggtgacgcggatacccacactaccatcttcggcaagcaaattaggagccagattacgcgctccggaataaattatggtaagaggcttgtcagccagttctatcaaatcccaggcaacctctggaacatcctgcacatagaaatccacctttaccagggaatctaccaataccagcatcgccttactgtcagagcgtcgcttgatttcatatacacggcgcaccgcttcttcattggtagcgtcacaacctatgccccaaatcgtatctgtcggatacaaaattaccccgccttcgctcatcacctggcaggcttttttaatgtcttctatcatttcttgatatataagttcacggattaacatgcaaaaatagtatttttgcagcgattataaataaagtttaagagaaaacaatggaagaaattcaatttaaccacaccctgcccatacaactacgcttcaatgacgtcgacaaattcggccatgtaaacaacactgtttacttttctttttatgatttaggaaaaacggaatatttcgcttccgtatgcccggatgtagattgggaaaaggatggcatcgttgtcgtccatattgaagcaaatttccttgcgcagatttatggttcggaccatattgccgtgcaaactgccgttactgaaataggaaccaagagtttccatctggcacagcgtgtcatcgatacggaaacccaagaagtaaaatgcgtttgtacttccgtcatggtagccttcgacctcgccaaacacgaatccaaaccactggaagaagagtggattgaagcaatctgcaaatatgagggaaaagatttgaagaaaaagaaataaaatcctatatttgtcaattaagctaacatttgtataagtaacaatctgttacatttagtcaactgctatgattcgattgatattattgaccgattttacagagtccttttcgtacaatctgctaaagggggtattggcctattccaaaagccatgaaccatgggtagtatgccgtatgccaccctcctacaaaaacagtcatggtatagaaggagtcttgaaatgggcaaagacatggcatgcagatgcaatcatcggcagatttgacaatgatgacaatgtggagctattccgtgaaaacgggattatcgcgttggcccaggattacaaatcaaggttcagcaatattccaaacatcaccggcgattaccgcaagaccggcagaatggcagcagagttttttctgagtaaaggctttcagaacttcgcattctacggttatcgcgatacggtatggtcacaagaacgttgcgagggtttctatgagtgcatagtatcccaagggtttggaaacaatttctattcttatcaagatcaatcacttgatgacttatggttttatgaggcaccacctctgctcaattggttaaagtcattgccgcaacctacggcactcatggcttgcgatgacaatcaaggtaaccgcattacggaaatctgtaaagtcaacaatatcagagtgcccgacaagatagcaatattaggagtcgacaatgatgagattatatgcaacctttcagaccctcccctatccagcatcagccaaaacattgtaagaggcggatttgaggctgccgccctcatagaacatctattgaatgacgaggaggccacttatcaggacgtagtcctccaaccggttaatataattaaccggctttcgaccgacttctattctaccaccgatgcccatatccaaaccgctctgaaatatatccatcagaatatagcggctgatatcactgtatcggatatagtgaaacaagtaccattatcacgccgtttattggagattcgtttcaagcaagtcactcagcagtccatccacaaatatatcttcaaccttaggatggaacgctttgcccaattgctgttgaccagtgatgctccgattgcagatgtggcggaacaagtcggaataaataacctgaagaacttgtcccgccaatttaaagctttgaagaaagtttctcccaatgaatatcggaaagagtaccagacaaagagttaccagcactgatttaatctggtacaaacaacatggtatcaggtaacacggtttccagaacattccgccccgaatacccgacttccaattcctggcccatgtaatcttcgaaatacagcaggtgcaactcgtggtaccctgcttcgagagcgactttcccttcggaacggcgtccgctgtgtccgccgtcgttatcaacaatcaatttaccgtctatgtatagtttagaaccatcatcggaaaaagtatagaaacggtatactcccctttctggaattttcaccaacgtacggaaatcataagcaaaatgatcagggacggctgcttcttcaatcgagaaattcttcatcaccccttccttcactttattacaggcggcaatatcggcaacacgtttacatttgccttcataataggtatatgccacaccctgcttcttggaagaagttcccgtagccggcaaataagccatactctgctcctcatccgaattcagacctgaagggtaatagtaggcagcctcccttcccgaaggagtggaaatccatgtgtcaaatttgaattggtcttcgtacagttcaatgatacgggctcctctcgtcaactctccatacgcatccgcaccggtcacccgtccgtatcccaatgcaacacctttatctattcctataaaatcgttatcatggtcatgccctacaaatactcccattacatccctcatgtcaaggaaggaagcaaacataccggaattgatgttagcggaggcaactccaccttctttatcattgccataagttttcccgtcacctctgatttcgttgtattcaatcagcggaatatggaaaaaggccaaagcaggaacgggattaccaccgttcttctccgcaaagtgtttactttgctttctgtaccattctatttggtcgaaatgaatccagtcgtaagcaccatagattttattaggctgatagtcgttggaatccatgcaatagagcaatgcctctacctggtccttcttctccggactataaatagaaatcacacaattaccacatcccataatatcttcagggccttttgcccccacatagtagggagacttcaagaggaaatcatagatttcattgcgcgtcaaatattctgcatcatggtttcccatcatcaccacaaaaggcatcttagcttcattgaaaatatccactacacttttccatccatccatagcagggtcatcggtcaccacatccccactcagtatagcaatgtccggatgttcggctgccaggacagcacggatagtagctgccgtttcggcacactttgcagaacccggcatccagtgcaaatctgtaaattgtgctactacaaacttgccattcttaaaaaagaattgcttctgcgcaaaagccgttaccgacatacagcccaatagtacaattaaaaaaacagctattttcttcataatttcttgagattaatatatttctatttcatctattgccaactcactctgcaacccttcatgaaaatatcctttcgggcacaagccaccactcaataattccaagcggacaaatgcagcttccgtttcggcaaatgaaagagataccgggaagcgggtaccttccgtcaaggtaaaatcataagtcagccgtttagtgcccaccggaataaaagtctgaccatccattgaaacagagacacccatcgctcttgccggccatatcccatttaccggcctccataaagaagaaaaggcaacttccttgactttttgaggtttcttcagttccactacaatctgtacagtatcctggtagaagctaatccagcgacgcatgtcgcgggcatagccacatcgtccatcagttagtccgaagcctttattcaagtgctcccatcctgcttcaggattacaagtatagtcacatccggttgccttgtttacagcaaaactcttgcgggtcactttccctagcggcttaccgtctctgtaaactgccgaataaacagttgcatcctcgtccaacggtatcggagtcccataaagggaagatgaagtgttgaccgttgaatcatttacggcatagtaaatatcggcatccggacagaaggtgttcaaagtcacctcataagtctgctgcgacttgttccacgcaccagtctgattgacttcatagaagttgcggcaagcattcactccgcaataatccaatcgttcaaactccttatccagcctacgggcaaacgactcgaagtccttatgttccggctgtgtccattgcacctctgacatagccagcaaacgggggaaagccatatattcaaaatactcaggagtctgtatgtactctccccagatattggcttgtacacctattatataagcttgttcttccggagtcagttctgcaggaagcgggttataattgtacaccgtatccaatggaaggaaaccgccgatagccaacggagcgaattccggactttcctggtagtaatccaaataacactttttgccgggtgtcataatgactttatgccgttggcgagccgcttcgatacctcctttctcgccacgccatgacatgacggtagcattaggggcaagccctccttccagaatctcatcccacccgatgatgtcacgccctttactgttcacaaattgctcaatccgatggataaaccaactttgcagagcttcttcgttgggcagaccttcccgcttcatcaaatgctggcaatgggcacacttcttccatgctttcttgggacactcatctccaccaatgtggatataatggctggggaagagttccataacttcggtcagcacattttgtaagaattcaaatgtatgctctttggaacaatagacctcatcaaaaacatcaaaataatcacgcaccacataagtctttcccaatccgcaagaaagttccggataggaagccagtgctgcggatgcatgccccggcatttctatttcgggaatgaccgtaatgaaacggtcggatgcatacttcacaatttcctttatttcttcctgcgtataataacctctcttttcttttccatcgtaacgccgtggaaaataataatcagagtgtcctatctgagtctgtttacgataagaacctatttcagtcagtttcgggtatttctttatttctattctccatccttggtcatctgtcagatgaaaatggaatttattcaatttatagaatgccatcaaatcaagaaacttcagcacttcctctttgggcagaaaattacgtcctacatccatcatagccccacgatgagggaaacggggagcatccgtaatgctgacagcaggaatcctaatctttccttcgtatttccggtcaccatcataaatggctgccggcatgagctgcagcaaagactggacaccataaaaaaatcctgcggcagtttcattggaagatatatttatcctatcggaagaaacctccaatgtataggcctcattgggcaaggaattatctatagataagcaaatatcggcctttcccgtttccgaaatacccttcagcgttacagaagtgtttttcaacgcatcctccaaataatgaaaaactttcatcgcggcttccccggaagggacagccactgttttttccccttgcaggacatacactccctgcattggagcaagttcattcggcatgggtataataccatagtttgccgctacatcatcagccactctcccacaagagagaaaaatgaatgacatagccagtaaccaatatcttatcttcatagtatttgggataataagttgggatattccttgattgtcttcaatatcagttcaccgaacaaagtatttgtccaggcaaaccaggaacgagtaaagtccgcggcatcctccgaatggaaagactcatgcataaagcccgtccctccgtccgtatcacgaagttgcttcagacaagcacgtatttcttcggaatcatccgttgtaaaagccttcataatgatgctcatcggccagatataattcaatcccacatgaggacctcctaccccttcgccggcttttcctttaaagaaataaggattattgtcactccatatcattttgcgggtactctggtaaatcgcatctttaaaagaacaataacccagataaggcgcagccagcaaactgggtacattggcatcgtccatacaaagcgcgctaccaaaaccgtcgacctcaaaagcataaatacgtccacaaaccggatgattgaaagtaccatacctgcggatagctgcatccacttcatctgccagtgctatacatttgccagagaagtccttgtttccataaactttatcctctatctcggccaattggcgcaatgacacaactgcaaacatattagaaggaatcagaaaaccgtattgtgtagcatcatctgacggacggaaagaagaaacgattaagccgaccggctttaccggtgctccccatccgttgttaatctgcgaatctgtagggcggtcgcaatcgcgcgtaaagctataaggtcctaagccttgtttcctctgttgctctttaaaggtcttgaccaccagcagcatcgctttatgccaattttcatcgaacacagacgtgtcttccgtgtattgccaataatgataggccaaacgaatgggatagcacaaagaatctatctcccatttgcgttcatgcagttccttaaccatatgttgtgtatggtcggtttcccaatagctgcccaacggcccgtcgttgaaggcattggcatacgggtctatcaagatacattcagtctgtctgttgacaagtcctgccaccatcagctgcaagtccctatctttcttcatcaacggcagatagggccatacttgcgctgaagagtcgcgcagccacatggcatctatatcacctgtaatgacgaaagtatccggtctgccattcttcactctatatctgacagtagtgtcaagcgtattgggaaaacagttctcgaacatccagcgcaacttctcgtcctttattttaggctttgcttcttcaatggcagcatctactgccttcgaaatgaagctccttttgcttgcagaaggacgcaacgaaacatatctctggctcaaagtcccggatgaagataacacggaagcgggctgaaaggtcattgcagccaaggcaagcccgccagtcttcagaaattggcgtcttgacatattgtttttcatgattgatgtcttctttaataggtatgcttaccggatgtcacatttatctttttctcttttccaccatagagtacacacagttcaaaatcgatattggaatctactgtaatacgaggttcatcacttgccgaacggcgtgcctcagcttttaaggaaataagcccttcgggaccaaaaggataacgttctatgccgttagtctccgtcaaattcatatcccagataatctgctttttggcataatctccccgaataccgataataaattctatcaattcggcaataggaggaagtcctgcccaacctacaaaattatcccttgccataaatcccggctcagcactttccggagcataatattcccaaaaagttccagtcttcttatagacctcaaacacttgagcataatgattcaaacaaatctcccgtgccagtttaccataacctttctgcacaagtccctgcatcaccatgtaattagttcccggccatacgccaccctgccaataacggccattctccttgtatttgggattatcggcagacaaagaaggaatacggtgtttccggttgaatgtggcaggattatccaattccttcaccatacggtccaactgtacagaatccaatacatcagtaaacagagcccaataggcacctattcccttggttgtacagagagtaccgtcagcatattggtcataaaggaaaccggtcttttcatcccaaagattgtcatggatatattttcccagcattttggcttcgtcttcaaactcttctatctcttgccaacgttccagataaaagcccatctcaagtagtaaattggcagtaaataattgctgtaggtttgtatccaaccaaatcatatgcccgtgactgtagatagggctgtattccgacggaacacggggcatattatccatgccggttccccatccgcttgaccagtaggttccatttctccaagtatggttcaatttcaaccacttataataagcacaaagtaccggaaatatcttgtgcaggcgttctgtatcaccaaactgatggaaatagaccatctcacaccaaggcatcaaattcggtccggtactcaccggatcatagcgttcaaagcaatcggcaccatctgcctttatttcacggcaaatgaaaccgtcgggatgctgcttggcgtaaaagttgttcagcgtattctggaaaggaaagaaacgggtaccatagcgggcaaacatcagaatgaaagaggaatcccacataaagatattaccattataagctgtatccaaatagcttgagacaaaacccgagcctgcttgaggagcacgaatattaccgatagctatttcccatgccttccaatacatttcaagttccttgtcatgtccaccccaaatgggattgggaagaatctgccgggcttcttcgaagcttttcggcacaatcgtctcaggttttgccacacgatattcgttttcagtgaccaacggttctttcacataagtattcttgtagggcagacgatacttctcatcgttgccacagctctgggcattgagcgacgaacccaccgagagcgacaacagacctgccaataaaacatgtttcagcatgggaaatagagttatttggttataatttaagcaacttctttattttatcaaagatggtcgtattctcatagattccggtaaattcttccgctccgggaccaaaagcatatacaggcaccatcacaccgctatggctgccggtggaaaacttgcagacaatcttgccttgtttcaaatcgccgtccacaagcgtaagtcctccggtttcatggtcggccgtcactacaaccagcgtttcgccgtccttagcagcccattcatagatagctccgatggtacggtcaaagtcgtgcgtttcctgcatcagcaagtccagatcgttgaaatgtccgtaatcatccagctgcgagccctctatcatcatgaagaaccctttcttgttctgattcagtaattcgatacctttcaaggatgcacgcgccaagaggtcgccacgctctgccggaagaggtgtatcctttggataaggcactgcgaacaccttgccactccctatagccgccagttcgtcccaagtgcggggtgtctggaaacccttcgtacgcagttcttcaaacaaattgcgtccgtccttccggttctcgaagtattgtgcaccgccgccaaacacatagtcggccttgcaatccacatatcccgtcaccacatcctcttctgcatccctgtccttgttgtgacagcagaagtcggcaggagtagcatcccataggcggcaggtcactgccagacccgttgattttcctttttccgaagccaaatcaatcagagatttcaaaggtcgtccttccgtatccactcccacatagtggtaattggtcttttgtccggtggcaatcgccgttcctccggcaccggagtccgtaatcagcttgtcggcacaataagtcttagacaaacccaccgcctggcagttgtccaggaaaagctttcccctgtttgcggtccatgccgaataaacgtgcatcaagctcattccgtcgccaatcattaggatgacgttcttcaccttcttgccttgcggaggcgttattttggtcacttcatacggttgttccaacacgtaggtctgttctttgtcacgacggctttgtgccgatgttccaacgggcagcaacacgattgccaaaagtgcccatacacttatctttgctattcttttcatctttctattttttatttttcaccacaaattacacagattgacacaaattcttctcttaattcataattcaaaaaaactctgtagaactctgtgtcctctgtggtgaattacgacatatcatttcattctaccgtcaccagcaccggagcatggtccgacaagaaagccccgttttccatctcggccaacacaccatatttcagcactttccatccgttgcccacaaacacataatctatcagtgaacgacgttcgtagggaatgctgccgaaatcgtggaaactccatacaggtccatatactacgggcgacaccgtgcgtgcatccgtcagatgtcccggatcttccgggttggtgatatgcttgatgacatccgactccggtgtagagttaaagtctccggtcagcaccaccggcatcccgttacccaattctttcactttattcaagataaggctgattccctcgcggcgtgccacaacgcccacatgatccaagtgcgtgttcatggccaggcactccttgtccgaaaccttgtccttcaatttcgcccatgaggcaacacgttcacaagcaccgtcccaacctttggaacctgccacttcgggcgtttcgctcagccagaatgtgccggaatcaagtacctcaaaacgctctttcttataccagagcgcgctatattctcctttttccttaccatctgtgcgacccacacctatcactccataatccggaaggcgctgctgcaagtcctgcaactggttgtgcagcacctcctgcatgcccacaatgtccgcatcataaaagcggatggcattggccgcacggtctttcctgtaccgccaattgttcaggctgtcttctggattgtcataccttatattgaaagacatcacattcatagtagattcctgcacggcaggcttgtcctgtttctcctgtccgcacgatacgagcagaagcgggaaaagtaataaagctattttcttcatggttatctgttttttgactatttcacatacaatgcagaagcaggaataggtgacagctcctgtgccgaaggaagtttccagccccaacccagctcttctccttcgtaatcctcaaagtaatacagcttgtaagcatggaatcctttcttcagtgccacagtccccgtagcaggaatagcggcgtgcgaaccatcgttattcaccaccatctcatcatcaatgtacaatacgctgccatcgtccgaacgagtcataaaggtgtagattccatcttcgggcacctctatcaagccggagaagatatagccgaagtggtcttcctgacgtgcctccttgatggaaggttctgccatgataccgatatcaagcaacggactcttctctatatccgccaccttccggtaagtaccctcgaaatatttgtaggatgtgccgttccgcacaggacagactgcaagtgcaggtttcatctcagccttggtggccatgatggagagtgtatggcttgggcagaatccgtccttgaatccttttgcctttatgggagtagtctggtccagttccagcggcttttcatagagcggtgacagttctgtaggttcgcttccatccagcgtatatctcacttctgctcctgccgttaccgtggccagtgccaccgttatcttatccataaacagattcaggtctttgtcaacgtatgggacagacaccacatgctccttagtataagagtaaagcgccgactcttccgaaactccacggctcttgtccggcttgtctgtcagcgtaaaacgcaattcgcccccttccatcagctgttcataggtaatgaagttaccctctatggcttctccattcagttctaccttgtttatgtagatattcttttccggattgttggcaagcacagacaatgtctttccgttggccagccttatcaccgccttatcaaacagcggcgtggtcagtgcaaattcattgctaccgggacacacggaatagaagcccagacttgaaaggatataccatgccgacatctgcccgcaatcttcgttaccgatgatgccttcgggagtgggtgcatacatctcacgcagcaaccggcgtgtcagttcctgggttttccaaggctgaccgacatagtcatacagataagcgatatgatggctcggctcattgccatgcacatactgacctatcaagccggtgatgtccgaaagttccccttccagcttcaagtccgaagagaatatggaatcgagtgccactacaaaatcatccttgccgccaaacaactgcatcatgccgttcacatcatgcggcacaaagaaacgatattgccaggcagtggcctccgtataggcacgtcccacctccaacggcttgaacggtgcttcccagttgccatccatccgtttgggacggaaaaacttggtagccccatcaaacacattcacatagttttgcgaacgtgcaatgaatgtcttgcaaatatcttctttctccatctcttgcgccatgcgggctatgcaccagtcatcgtaggcaaattccagcaggcaagagatagattcccgcttgatgttcgaggggatgaaaccgttccgcacatagcagtccgcccctttttcgttcttctcggcagaggttaccatcgcttccagcgctttctcggcatcaaacccacggatgcctttcagataagcatctgctatgacagaagcggagtgatagcctatcatcgtccccgtctctccggcagaaagaggccagatgggaagttcgcccgaagcatcataaatatccaggaaagagttcaccatgtcattcaccaatccggcatcgagtagtgtcatcagcggattccaagcacggaaagtgtcccacaaggagaaagtggagtaatgcttcctgccctcgggcatcctgcctgtcgtcatgtcgtgacggcgatactcaccattcacatcgctcaccacattgggcaccaccatcgaatgatacaaagccgtatagaaaatcttcctgtcgtccgcattgccgccttctaccacaatggcagagagcgcctgttcccaagcagtacgagcagcactgcgcacggtatcgaaatcgaaatccgccacttcgaattccaaattttcacgtgcattcttttcgctaacaacggacagcccgacttttgccaccaagggttctccgtcgctgttgtcaaaagccaagcaagcctgcaagtgggtaccggtcaattttgcctgtgtagcaaccggtttccgttcctgcacaaagtccaccgtcttaaaaggtttagagaattgcgccacaaaatagacatactggttatccgtccatcccctagtgcggcgcataccggcaatctcatagtcggacgtctgttccagtgtagcttcatagatatgttcgttatcgagcagatgtgccaagtcgatgatgacagccgcttcctttccagcggggaatgtgtagcggtgcacaccggcatgggcggttgccgtcagttccacctttataccttcttctttcagcacgacggaataatatccggcggaagcctcctcttctttatggctgaaagccgcaggaagacaaagcgtttcggccgtcaagtccggcttttgtgtagtggggcgaaacaggacgtcgcccaagtcaatgcagccggtgccgctaaggtgggtatgcgaaaatcccttcaaagtgctgtcgtcatagtggtaccccgcacaggcatcccagtttccggcacgcgtgtcgggactcagttgcactgccccgaaaggcacagtcgcccccggataggtatgtccgtggaagccggtaccgatgaacgggtctacgcaatcaacaggctgtttcacatcggacgaacaagccccacacactacaccgaccaaaacggcatacagaagttctttcaaattcattgagatgaatgtttttcaagttattgtttacgatgttttcctactcttacagacacaaaagtacataaaaagcatgagttttttacaccgccataataaagaaatcattttttcttcagaggaaagataacaaaaccttcccatataacaaaattctgcaagagccgatatgccacgcacaccaacccttgcagatcagaccaatggcaatgaggtctattttatcattccacacccggttcaatggccagacaataatctttcacattgccggacactgaatttgtggtagtctcacgaagaacccacgatttgtctgcaaccataaagatagcatattctccggctgcaatatcagcttggctaaactttacgttgctgatggactctgcaaccctcttcaagtcctccacaagattgcttttcacagtaccaatcaacacaccattgtgcctgctgtccacaacggttcccagtgccgattttgcagcatttatctgctctttagagctaaaacgtgccgtagcgaaaggcaccaatatgtccttctggttctccttcaccatactcttgcacataatgctgataaacttgatgaagcaatcgttactcaccttgaatccttcttcagcattgttcttgtgattgtacaagataagagagccttccgtagcaatgccatttccattcttaacaaccttattcaatgcataaccgggaaaacggctggtggcaaaagagatatgagtggccatattgctgccaccgcttacgtccacacggtctatcacaccaatggaacaatcctcgcccaacgcgttgatatgattgacaatcgcatcggtttccccaatgttggcgtcattcagtgccgacaaaaagtgaacttccacgcttctggttttgttccaatcggagttagcgttctcttcctgcttgatattgcccactccaaggtcctctgcgatacaggagcctgccagtactgagcagaatcctagtgcggcgaatgtatataatatattctttttcatatcgttatcgtattactttttaagttcaacctcaactattaccggatcatggtcagaaagctttcctgcatccacaaacttttcactaattttattccaaccgcctttggaagcaaagatataatctacccaatggttccccatttggtcaaattcagttccaataagctctatgggcgaagcaccgggataaacgttcaagtcaccggccagaagagcaggcaccttggtatcgttcaagaatgcaatcaatgcttccgcctgttcctgctgtcctccggtatggtcgaagtgagtggcaaccacagcaatgatgtcgcccgaaggcaacgccacctcggcaatcacggcaccacgctggtcagaagaacctgccggacggggaagctgcattgtacgagaagcgataatagggtatctgctcaaaatggcgttaccataaagctcgttcatgcaataggtatagttctcttcggggttttgtccctgcttgttattcaggttataagaatagccatagatggcaaacatacccaacttatcggcaatttcctgcactttatctatatattttccatctctcatctggcgggaacttctgttctccacctcattgagtatgataaagtccgcattttcatctttcaagaagtcggaataaggagtcacatcaaaagagttacgctccccccatttatcctcctgttcgaaggacaagacattgaaagtaatcactttaaaccggttgtcctgcgccttggctttggagaaaaatcccccaaagaccatcacgaagagcaccaatatgatataaggataaaatctcgtattcattttattgatttatttaaacattaataaacattctgcttcaagttc
